(19) United States
(12) Patent Application Publication
(10) Pub. No.: US 2025/0108121 A1
(43) Pub. Date: Apr. 3, 2025

(54) METHOD FOR PRODUCING AN ANTIBODY PEPTIDE CONJUGATE

(71) Applicant: AMGEN INC., Thousand Oaks, CA (US)

(72) Inventor: Jonathan DIEP, Arcadia, CA (US)

(21) Appl. No.: 18/708,513

(22) PCT Filed: Nov. 8, 2022
(86) PCT No.: PCT/US2022/079479

§ 371 Date: May 8, 2024

Related U.S. Application Data
(60) Provisional application No. 63/277,597, filed on Nov. 9, 2021.

(51) Int. Cl. A61K 47/68; C07K 14/605; C07K 16/28

(52) U.S. Cl. CPC A61K 47/6811; A61K 47/6851; C07K 14/605; C07K 16/2869; C07K 2317/522; C07K 2317/524; C07K 2317/526; C07K 2317/53; C07K 2317/565; C07K 2317/76

(57) ABSTRACT

The present invention relates to mammalian cells modified to provide for reduced cleavage of peptides that will be conjugated to polypeptides expressed by the cells. In particular, the invention relates to a method of producing an antibody peptide conjugate, the method comprising: a) expressing the antibody in a mammalian cell wherein the mammalian cell is a cathepsin D knock out cell, and wherein the antibody comprises a cysteine or non-canonical amino acid amino acid substitution at one or more conjugation site(s); b) purifying the antibody; and c) conjugating a peptide to the antibody at the conjugation site(s).

### CROSS REFERENCE TO RELATED APPLICATIONS

[0001] This application is a U.S. National Phase of PCT/US2022/079479, filed Nov. 8, 2022, which claims the benefit of U.S. Provisional Patent Application No. 63/277,597, filed Nov. 9, 2021, each of which is incorporated herein by reference in its entirety.

### FIELD OF THE INVENTION

[0002] The present disclosure relates to a method of producing an antibody peptide conjugate, wherein the antibody is produced by a cell line engineered to have reduced or eliminated expression of cathepsin D so that the conjugated peptide does not get clipped.

### INCORPORATION BY REFERENCE

[0003] Incorporated by reference in its entirety is a sequence listing in XML format, identifiable by the following file properties: Filename: A-2743-WO01-SEC_Sequence_Listing.XML; File size: 3,555,835 bytes; Created: Nov. 4, 2022.

### BACKGROUND OF THE INVENTION

[0004] During recombinant antibody production, host cells coproduce endogenous proteins related to normal cell functions such as cell growth, proliferation, survival, gene transcription, protein synthesis, and the like. Endogenous host cell proteins also can be released into the cell culture medium as a result of cell death/apoptosis/lysis. All the endogenous proteins co-expressed during recombinant protein production are called host cell proteins (HCPs). HCPs constitute a major part of process-related impurities present in recombinant therapeutic proteins, such as monoclonal antibodies. These HCP impurities can significantly affect efficacy and stability of antibodies, as well as cause immunogenicity. Moreover, HCPs that copurify with the antibodies can be difficult to remove. When such a HCP is a protease, a peptide that is to be conjugated to the antibody can be damaged by clipping, resulting in loss of efficacy and a mixture of conjugated products.

[0005] Thus, there is a need for means to reduce or eliminate specific protease during antibody production. For example, there is a need for host cell lines engineered to have reduced or eliminated expression of cathepsin D.

### SUMMARY OF THE INVENTION

[0006] In one aspect the present disclosure is directed to a method for producing an antibody peptide conjugate, the method comprising:
[0007] a) expressing the antibody in a mammalian cell wherein the mammalian cell is a cathepsin D knock out cell, and wherein the antibody comprises a cysteine or non-canonical amino acid amino acid substitution at one or more conjugation site(s);
[0008] b) purifying the antibody; and
[0009] c) conjugating a peptide to the antibody at the conjugation site(s).

[0010] In one embodiment, both alleles of cathepsin D of the mammalian cell are knocked out.

[0011] In one embodiment, the mammalian cell is a CHO cell.

[0012] In one embodiment, the antibody is an anti-GIPR antibody.

[0013] In one embodiment, the peptide is a GLP-1 agonist.

[0014] In one embodiment, the alleles of cathepsin D are knocked out using CRISPR or using zinc-finger technology.

[0015] In one embodiment, the antibody is a monoclonal antibody, a recombinant antibody, a human antibody, a humanized antibody, or a chimeric antibody.

[0016] In one embodiment, the antibody is a human antibody.

[0017] In one embodiment, the antibody is a monoclonal antibody.

[0018] In one embodiment, the antibody is a human antibody and wherein the antibody is of the IgG1-, IgG2-IgG3- or IgG4-type.

[0019] In one embodiment, the antibody is of the IgG1- or the IgG2-type.

[0020] In one embodiment, the antibody inhibits binding of GIP to the extracellular portion of human GIPR.

[0021] In one embodiment, the CH1-hinge-CH2-CH3 domain of the antibody heavy chain comprises SEQ ID NO: 3310.

[0022] In one embodiment, the antibody comprises a CDRL1, a CDRL2, a CDRL3, a CDRH1, a CDRH2, and a CDRH3, wherein the CDRL1 comprises a sequence selected from the group consisting of SEQ ID NOs: 629-785; the CDRL2 comprises a sequence selected from the group consisting of SEQ ID NOs: 786-942; the CDRL3 comprises a sequence selected from the group consisting of SEQ ID NOs: 943-1099; the CDRH1 comprises a sequence selected from the group consisting of SEQ ID NOs: 1100-1256; the CDRH2 comprises a sequence selected from the group consisting of SEQ ID NOs: 1257-1413; and the CDRH3 comprises a sequence selected from the group consisting of SEQ ID NOs: 1414-1570, wherein

[0023] the antibody or functional fragment thereof comprises a cysteine or non-canonical amino acid amino acid substitution at one or more conjugation site(s) selected from the group consisting of
[0024] D70 of the antibody light chain relative to reference sequence SEQ ID NO: 455,
[0025] E276 of the antibody heavy chain relative to reference sequence SEQ ID NO: 612, and
[0026] T363 of the antibody heavy chain relative to reference sequence SEQ ID NO: 612.

[0027] In one embodiment, the antibody comprises a CDRL1, a CDRL2, a CDRL3, a CDRH1, a CDRH2, and a CDRH3, wherein each CDRL1, CDRL2, CDRL3, CDRH1, CDRH2, and CDRH3, respectively, comprises a sequence selected from the group consisting of SEQ ID NO: 629, SEQ ID NO: 786, SEQ ID NO: 943, SEQ ID NO: 1100, SEQ ID NO: 1257, and SEQ ID NO: 1414; SEQ ID NO: 630, SEQ ID NO: 787, SEQ ID NO: 944, SEQ ID NO: 1101, SEQ ID NO: 1258, and SEQ ID NO: 1415; SEQ ID NO: 631, SEQ ID NO: 788, SEQ ID NO: 945, SEQ ID NO: 1102, SEQ ID NO: 1259, and SEQ ID NO: 1416; SEQ ID NO: 632, SEQ ID NO: 789, SEQ ID NO: 946, SEQ ID NO: 1103, SEQ ID NO: 1260, and SEQ ID NO: 1417; SEQ ID NO: 633, SEQ ID NO: 790, SEQ ID NO: 947, SEQ ID NO: 1104, SEQ ID NO: 1261, and SEQ ID NO: 1418; SEQ ID NO: 634, SEQ ID NO: 791, SEQ ID NO: 948, SEQ ID NO: 1105, SEQ ID NO: 1262, and SEQ ID NO: 1419; SEQ ID NO: 635, SEQ ID NO: 792, SEQ ID NO: 949, SEQ ID NO: 1106, SEQ ID NO: 1263, and SEQ ID NO: 1420; SEQ ID NO: 636, SEQ ID NO: 793, SEQ ID NO: 950, SEQ ID NO: 1107, SEQ ID NO: 1264, and SEQ ID NO: 1421; SEQ ID NO: 637, SEQ ID NO: 794, SEQ ID NO: 951, SEQ ID NO: 1108, SEQ ID NO: 1265, and SEQ ID NO: 1422; SEQ ID NO: 638, SEQ ID NO: 795, SEQ ID NO: 952, SEQ ID NO: 1109, SEQ ID NO: 1266, and SEQ ID NO: 1423; SEQ ID NO: 639, SEQ ID NO: 796, SEQ ID NO: 953, SEQ ID NO: 1110, SEQ ID NO: 1267, and SEQ ID NO: 1424; SEQ ID NO: 640, SEQ ID NO: 797, SEQ ID NO: 954, SEQ ID NO: 1111, SEQ ID NO: 1268, and SEQ ID NO: 1425; SEQ ID NO: 641, SEQ ID NO: 798, SEQ ID NO: 955, SEQ ID NO: 1112, SEQ ID NO: 1269, and SEQ ID NO: 1426; SEQ ID NO: 642, SEQ ID NO: 799, SEQ ID NO: 956, SEQ ID NO: 1113, SEQ ID NO: 1270, and SEQ ID NO: 1427; SEQ ID NO: 643, SEQ ID NO: 800, SEQ ID NO: 957, SEQ ID NO: 1114, SEQ ID NO: 1271, and SEQ ID NO: 1428; SEQ ID NO: 644, SEQ ID NO: 801, SEQ ID NO: 958, SEQ ID NO: 1115, SEQ ID NO: 1272, and SEQ ID NO: 1429; SEQ ID NO: 645, SEQ ID NO: 802, SEQ ID NO: 959, SEQ ID NO: 1116, SEQ ID NO: 1273, and SEQ ID NO: 1430; SEQ ID NO: 646, SEQ ID NO: 803, SEQ ID NO: 960, SEQ ID NO: 1117, SEQ ID NO: 1274, and SEQ ID NO: 1431; SEQ ID NO: 647, SEQ ID NO: 804, SEQ ID NO: 961, SEQ ID NO: 1118, SEQ ID NO: 1275, and SEQ ID NO: 1432; SEQ ID NO: 648, SEQ ID NO: 805, SEQ ID NO: 962, SEQ ID NO: 1119, SEQ ID NO: 1276, and SEQ ID NO: 1433; SEQ ID NO: 649, SEQ ID NO: 806, SEQ ID NO: 963, SEQ ID NO: 1120, SEQ ID NO: 1277, and SEQ ID NO: 1434; SEQ ID NO: 650, SEQ ID NO: 807, SEQ ID NO: 964, SEQ ID NO: 1121, SEQ ID NO: 1278, and SEQ ID NO: 1435; SEQ ID NO: 651, SEQ ID NO: 808, SEQ ID NO: 965, SEQ ID NO: 1122, SEQ ID NO: 1279, and SEQ ID NO: 1436; SEQ ID NO: 652, SEQ ID NO: 809, SEQ ID NO: 966, SEQ ID NO: 1123, SEQ ID NO: 1280, and SEQ ID NO: 1437; SEQ ID NO: 653, SEQ ID NO: 810, SEQ ID NO: 967, SEQ ID NO: 1124, SEQ ID NO: 1281, and SEQ ID NO: 1438; SEQ ID NO: 654, SEQ ID NO: 811, SEQ ID NO: 968, SEQ ID NO: 1125, SEQ ID NO: 1282, and SEQ ID NO: 1439; SEQ ID NO: 655, SEQ ID NO: 812, SEQ ID NO: 969, SEQ ID NO: 1126, SEQ ID NO: 1283, and SEQ ID NO: 1440; SEQ ID NO: 656, SEQ ID NO: 813, SEQ ID NO: 970, SEQ ID NO: 1127, SEQ ID NO: 1284, and SEQ ID NO: 1441; SEQ ID NO: 657, SEQ ID NO: 814, SEQ ID NO: 971, SEQ ID NO: 1128, SEQ ID NO: 1285, and SEQ ID NO: 1442; SEQ ID NO: 658, SEQ ID NO: 815, SEQ ID NO: 972, SEQ ID NO: 1129, SEQ ID NO: 1286, and SEQ ID NO: 1443; SEQ ID NO: 659, SEQ ID NO: 816, SEQ ID NO: 973, SEQ ID NO: 1130, SEQ ID NO: 1287, and SEQ ID NO: 1444; SEQ ID NO: 660, SEQ ID NO: 817, SEQ ID NO: 974, SEQ ID NO: 1131, SEQ ID NO: 1288, and SEQ ID NO: 1445; SEQ ID NO: 661, SEQ ID NO: 818, SEQ ID NO: 975, SEQ ID NO: 1132, SEQ ID NO: 1289, and SEQ ID NO: 1446; SEQ ID NO: 662, SEQ ID NO: 819, SEQ ID NO: 976, SEQ ID NO: 1133, SEQ ID NO: 1290, and SEQ ID NO: 1447; SEQ ID NO: 663, SEQ ID NO: 820, SEQ ID NO: 977, SEQ ID NO: 1134, SEQ ID NO: 1291, and SEQ ID NO: 1448; SEQ ID NO: 664, SEQ ID NO: 821, SEQ ID NO: 978, SEQ ID NO: 1135, SEQ ID NO: 1292, and SEQ ID NO: 1449; SEQ ID NO: 665, SEQ ID NO: 822, SEQ ID NO: 979, SEQ ID NO: 1136, SEQ ID NO: 1293, and SEQ ID NO: 1450; SEQ ID NO: 666, SEQ ID NO: 823, SEQ ID NO: 980, SEQ ID NO: 1137, SEQ ID NO: 1294, and SEQ ID NO: 1451; SEQ ID NO: 667, SEQ ID NO: 824, SEQ ID NO: 981, SEQ ID NO: 1138, SEQ ID NO: 1295, and SEQ ID NO: 1452; SEQ ID NO: 668, SEQ ID NO: 825, SEQ ID NO: 982, SEQ ID NO: 1139, SEQ ID NO: 1296, and SEQ ID NO: 1453; SEQ ID NO: 669, SEQ ID NO: 826, SEQ ID NO: 983, SEQ ID NO: 1140, SEQ ID NO: 1297, and SEQ ID NO: 1454; SEQ ID NO: 670, SEQ ID NO: 827, SEQ ID NO: 984, SEQ ID NO: 1141, SEQ ID NO: 1298, and SEQ ID NO: 1455; SEQ ID NO: 671, SEQ ID NO: 828, SEQ ID NO: 985, SEQ ID NO: 1142, SEQ ID NO: 1299, and SEQ ID NO: 1456; SEQ ID NO: 672, SEQ ID NO: 829, SEQ ID NO: 986, SEQ ID NO: 1143, SEQ ID NO: 1300, and SEQ ID NO: 1457; SEQ ID NO: 673, SEQ ID NO: 830, SEQ ID NO: 987, SEQ ID NO: 1144, SEQ ID NO: 1301, and SEQ ID NO: 1458; SEQ ID NO: 674, SEQ ID NO: 831, SEQ ID NO: 988, SEQ ID NO: 1145, SEQ ID NO: 1302, and SEQ ID NO: 1459; SEQ ID NO: 675, SEQ ID NO: 832, SEQ ID NO: 989, SEQ ID NO: 1146, SEQ ID NO: 1303, and SEQ ID NO: 1460; SEQ ID NO: 676, SEQ ID NO: 833, SEQ ID NO: 990, SEQ ID NO: 1147, SEQ ID NO: 1304, and SEQ ID NO: 1461; SEQ ID NO: 677, SEQ ID NO: 834, SEQ ID NO: 991, SEQ ID NO: 1148, SEQ ID NO: 1305, and SEQ ID NO: 1462; SEQ ID NO: 678, SEQ ID NO: 835, SEQ ID NO: 992, SEQ ID NO: 1149, SEQ ID NO: 1306, and SEQ ID NO: 1463; SEQ ID NO: 679, SEQ ID NO: 836, SEQ ID NO: 993, SEQ ID NO: 1150, SEQ ID NO: 1307, and SEQ ID NO: 1464; SEQ ID NO: 680, SEQ ID NO: 837, SEQ ID NO: 994, SEQ ID NO: 1151, SEQ ID NO: 1308, and SEQ ID NO: 1465; SEQ ID NO: 681, SEQ ID NO: 838, SEQ ID NO: 995, SEQ ID NO: 1152, SEQ ID NO: 1309, and SEQ ID NO: 1466; SEQ ID NO: 682, SEQ ID NO: 839, SEQ ID NO: 996, SEQ ID NO: 1153, SEQ ID NO: 1310, and SEQ ID NO: 1467; SEQ ID NO: 683, SEQ ID NO: 840, SEQ ID NO: 997, SEQ ID NO: 1154, SEQ ID NO: 1311, and SEQ ID NO: 1468; SEQ ID NO: 684, SEQ ID NO: 841, SEQ ID NO: 998, SEQ ID NO: 1155, SEQ ID NO: 1312, and SEQ ID NO: 1469; SEQ ID NO: 685, SEQ ID NO: 842, SEQ ID NO: 999, SEQ ID NO: 1156, SEQ ID NO: 1313, and SEQ ID NO: 1470; SEQ ID NO: 686, SEQ ID NO: 843, SEQ ID NO: 1000, SEQ ID NO: 1157, SEQ ID NO: 1314, and SEQ ID NO: 1471; SEQ ID NO: 687, SEQ ID NO: 844, SEQ ID NO: 1001, SEQ ID NO: 1158, SEQ ID NO: 1315, and SEQ ID NO: 1472; SEQ ID NO: 688, SEQ ID NO: 845, SEQ ID NO: 1002, SEQ ID NO: 1159, SEQ ID NO: 1316, and SEQ ID NO: 1473; SEQ ID NO: 689, SEQ ID NO: 846, SEQ ID NO: 1003, SEQ ID NO: 1160, SEQ ID NO: 1317, and SEQ ID NO: 1474; SEQ ID NO: 690, SEQ ID NO: 847, SEQ ID NO: 1004, SEQ ID NO: 1161, SEQ ID NO: 1318, and SEQ ID NO: 1475; SEQ ID NO: 691, SEQ ID NO: 848, SEQ ID NO: 1005, SEQ ID NO: 1162, SEQ ID NO: 1319, and SEQ ID NO: 1476; SEQ ID NO: 692, SEQ ID NO: 849, SEQ ID NO: 1006, SEQ ID NO: 1163, SEQ ID NO: 1320, and SEQ ID NO: 1477; SEQ ID NO: 693, SEQ ID NO: 850, SEQ ID NO: 1007, SEQ ID NO: 1164, SEQ ID NO: 1321, and SEQ ID NO: 1478; SEQ ID NO: 694, SEQ ID NO: 851, SEQ ID NO: 1008, SEQ ID NO: 1165, SEQ ID NO: 1322, and SEQ ID NO: 1479; SEQ ID NO: 695, SEQ ID NO: 852, SEQ ID NO: 1009, SEQ ID NO: 1166, SEQ ID NO: 1323, and SEQ ID NO: 1480; SEQ ID NO: 696, SEQ ID NO: 853, SEQ ID NO: 1010, SEQ ID NO: 1167, SEQ ID NO: 1324, and SEQ ID NO: 1481; SEQ ID NO: 697, SEQ ID NO: 854, SEQ ID NO: 1011, SEQ ID NO: 1168, SEQ ID NO: 1325, and SEQ ID NO: 1482; SEQ ID NO: 698, SEQ ID NO: 855, SEQ ID NO: 1012, SEQ ID NO: 1169, SEQ ID NO: 1326, and SEQ ID NO: 1483; SEQ ID NO: 699, SEQ ID NO: 856, SEQ ID NO: 1013, SEQ ID NO: 1170, SEQ ID NO: 1327, and SEQ ID NO: 1484; SEQ ID NO: 700, SEQ ID NO: 857, SEQ ID NO: 1014, SEQ ID NO: 1171, SEQ ID NO: 1328, and SEQ ID NO: 1485; SEQ ID NO: 701, SEQ ID NO: 858, SEQ ID NO: 1015, SEQ ID NO: 1172, SEQ ID NO: 1329, and SEQ ID NO: 1486; SEQ ID NO: 702, SEQ ID NO: 859, SEQ ID NO: 1016, SEQ ID NO: 1173, SEQ ID NO: 1330, and SEQ ID NO: 1487; SEQ ID NO: 703, SEQ ID NO: 860, SEQ ID NO: 1017, SEQ ID NO: 1174, SEQ ID NO: 1331, and SEQ ID NO: 1488; SEQ ID NO: 704, SEQ ID NO: 861, SEQ ID NO: 1018, SEQ ID NO: 1175, SEQ ID NO: 1332, and SEQ ID NO: 1489; SEQ ID NO: 705, SEQ ID NO: 862, SEQ ID NO: 1019, SEQ ID NO: 1176, SEQ ID NO: 1333, and SEQ ID NO: 1490; SEQ ID NO: 706, SEQ ID NO: 863, SEQ ID NO: 1020, SEQ ID NO: 1177, SEQ ID NO: 1334, and SEQ ID NO: 1491; SEQ ID NO: 707, SEQ ID NO: 864, SEQ ID NO: 1021, SEQ ID NO: 1178, SEQ ID NO: 1335, and SEQ ID NO: 1492; SEQ ID NO: 708, SEQ ID NO: 865, SEQ ID NO: 1022, SEQ ID NO: 1179, SEQ ID NO: 1336, and SEQ ID NO: 1493; SEQ ID NO: 709, SEQ ID NO: 866, SEQ ID NO: 1023, SEQ ID NO: 1180, SEQ ID NO: 1337, and SEQ ID NO: 1494; SEQ ID NO: 710, SEQ ID NO: 867, SEQ ID NO: 1024, SEQ ID NO: 1181, SEQ ID NO: 1338, and SEQ ID NO: 1495; SEQ ID NO: 711, SEQ ID NO: 868, SEQ ID NO: 1025, SEQ ID NO: 1182, SEQ ID NO: 1339, and SEQ ID NO: 1496; SEQ ID NO: 712, SEQ ID NO: 869, SEQ ID NO: 1026, SEQ ID NO: 1183, SEQ ID NO: 1340, and SEQ ID NO: 1497; SEQ ID NO: 713, SEQ ID NO: 870, SEQ ID NO: 1027, SEQ ID NO: 1184, SEQ ID NO: 1341, and SEQ ID NO: 1498; SEQ ID NO: 714, SEQ ID NO: 871, SEQ ID NO: 1028, SEQ ID NO: 1185, SEQ ID NO: 1342, and SEQ ID NO: 1499; SEQ ID NO: 715, SEQ ID NO: 872, SEQ ID NO: 1029, SEQ ID NO: 1186, SEQ ID NO: 1343, and SEQ ID NO: 1500; SEQ ID NO: 716, SEQ ID NO: 873, SEQ ID NO: 1030, SEQ ID NO: 1187, SEQ ID NO: 1344, and SEQ ID NO: 1501; SEQ ID NO: 717, SEQ ID NO: 874, SEQ ID NO: 1031, SEQ ID NO: 1188, SEQ ID NO: 1345, and SEQ ID NO: 1502; SEQ ID NO: 718, SEQ ID NO: 875, SEQ ID NO: 1032, SEQ ID NO: 1189, SEQ ID NO: 1346, and SEQ ID NO: 1503; SEQ ID NO: 719, SEQ ID NO: 876, SEQ ID NO: 1033, SEQ ID NO: 1190, SEQ ID NO: 1347, and SEQ ID NO: 1504; SEQ ID NO: 720, SEQ ID NO: 877, SEQ ID NO: 1034, SEQ ID NO: 1191, SEQ ID NO: 1348, and SEQ ID NO: 1505; SEQ ID NO: 721, SEQ ID NO: 878, SEQ ID NO: 1035, SEQ ID NO: 1192, SEQ ID NO: 1349, and SEQ ID NO: 1506; SEQ ID NO: 722, SEQ ID NO: 879, SEQ ID NO: 1036, SEQ ID NO: 1193, SEQ ID NO: 1350, and SEQ ID NO: 1507; SEQ ID NO: 723, SEQ ID NO: 880, SEQ ID NO: 1037, SEQ ID NO: 1194, SEQ ID NO: 1351, and SEQ ID NO: 1508; SEQ ID NO: 724, SEQ ID NO: 881, SEQ ID NO: 1038, SEQ ID NO: 1195, SEQ ID NO: 1352, and SEQ ID NO: 1509; SEQ ID NO: 725, SEQ ID NO: 882, SEQ ID NO: 1039, SEQ ID NO: 1196, SEQ ID NO: 1353, and SEQ ID NO: 1510; SEQ ID NO: 726, SEQ ID NO: 883, SEQ ID NO: 1040, SEQ ID NO: 1197, SEQ ID NO: 1354, and SEQ ID NO: 1511; SEQ ID NO: 727, SEQ ID NO: 884, SEQ ID NO: 1041, SEQ ID NO: 1198, SEQ ID NO: 1355, and SEQ ID NO: 1512; SEQ ID NO: 728, SEQ ID NO: 885, SEQ ID NO: 1042, SEQ ID NO: 1199, SEQ ID NO: 1356, and SEQ ID NO: 1513; SEQ ID NO: 729, SEQ ID NO: 886, SEQ ID NO: 1043, SEQ ID NO: 1200, SEQ ID NO: 1357, and SEQ ID NO: 1514; SEQ ID NO: 730, SEQ ID NO: 887, SEQ ID NO: 1044, SEQ ID NO: 1201, SEQ ID NO: 1358, and SEQ ID NO: 1515; SEQ ID NO: 731, SEQ ID NO: 888, SEQ ID NO: 1045, SEQ ID NO: 1202, SEQ ID NO: 1359, and SEQ ID NO: 1516; SEQ ID NO: 732, SEQ ID NO: 889, SEQ ID NO: 1046, SEQ ID NO: 1203, SEQ ID NO: 1360, and SEQ ID NO: 1517; SEQ ID NO: 733, SEQ ID NO: 890, SEQ ID NO: 1047, SEQ ID NO: 1204, SEQ ID NO: 1361, and SEQ ID NO: 1518; SEQ ID NO: 734, SEQ ID NO: 891, SEQ ID NO: 1048, SEQ ID NO: 1205, SEQ ID NO: 1362, and SEQ ID NO: 1519; SEQ ID NO: 735, SEQ ID NO: 892, SEQ ID NO: 1049, SEQ ID NO: 1206, SEQ ID NO: 1363, and SEQ ID NO: 1520; SEQ ID NO: 736, SEQ ID NO: 893, SEQ ID NO: 1050, SEQ ID NO: 1207, SEQ ID NO: 1364, and SEQ ID NO: 1521; SEQ ID NO: 737, SEQ ID NO: 894, SEQ ID NO: 1051, SEQ ID NO: 1208, SEQ ID NO: 1365, and SEQ ID NO: 1522; SEQ ID NO: 738, SEQ ID NO: 895, SEQ ID NO: 1052, SEQ ID NO: 1209, SEQ ID NO: 1366, and SEQ ID NO: 1523; SEQ ID NO: 739, SEQ ID NO: 896, SEQ ID NO: 1053, SEQ ID NO: 1210, SEQ ID NO: 1367, and SEQ ID NO: 1524; SEQ ID NO: 740, SEQ ID NO: 897, SEQ ID NO: 1054, SEQ ID NO: 1211, SEQ ID NO: 1368, and SEQ ID NO: 1525; SEQ ID NO: 741, SEQ ID NO: 898, SEQ ID NO: 1055, SEQ ID NO: 1212, SEQ ID NO: 1369, and SEQ ID NO: 1526; SEQ ID NO: 742, SEQ ID NO: 899, SEQ ID NO: 1056, SEQ ID NO: 1213, SEQ ID NO: 1370, and SEQ ID NO: 1527; SEQ ID NO: 743, SEQ ID NO: 900, SEQ ID NO: 1057, SEQ ID NO: 1214, SEQ ID NO: 1371, and SEQ ID NO: 1528; SEQ ID NO: 744, SEQ ID NO: 901, SEQ ID NO: 1058, SEQ ID NO: 1215, SEQ ID NO: 1372, and SEQ ID NO: 1529; SEQ ID NO: 745, SEQ ID NO: 902, SEQ ID NO: 1059, SEQ ID NO: 1216, SEQ ID NO: 1373, and SEQ ID NO: 1530; SEQ ID NO: 746, SEQ ID NO: 903, SEQ ID NO: 1060, SEQ ID NO: 1217, SEQ ID NO: 1374, and SEQ ID NO: 1531; SEQ ID NO: 747, SEQ ID NO: 904, SEQ ID NO: 1061, SEQ ID NO: 1218, SEQ ID NO: 1375, and SEQ ID NO: 1532; SEQ ID NO: 748, SEQ ID NO: 905, SEQ ID NO: 1062, SEQ ID NO: 1219, SEQ ID NO: 1376, and SEQ ID NO: 1533; SEQ ID NO: 749, SEQ ID NO: 906, SEQ ID NO: 1063, SEQ ID NO: 1220, SEQ ID NO: 1377, and SEQ ID NO: 1534; SEQ ID NO: 750, SEQ ID NO: 907, SEQ ID NO: 1064, SEQ ID NO: 1221, SEQ ID NO: 1378, and SEQ ID NO: 1535; SEQ ID NO: 751, SEQ ID NO: 908, SEQ ID NO: 1065, SEQ ID NO: 1222, SEQ ID NO: 1379, and SEQ ID NO: 1536; SEQ ID NO: 752, SEQ ID NO: 909, SEQ ID NO: 1066, SEQ ID NO: 1223, SEQ ID NO: 1380, and SEQ ID NO: 1537; SEQ ID NO: 753, SEQ ID NO: 910, SEQ ID NO: 1067, SEQ ID NO: 1224, SEQ ID NO: 1381, and SEQ ID NO: 1538; SEQ ID NO: 754, SEQ ID NO: 911, SEQ ID NO: 1068, SEQ ID NO: 1225, SEQ ID NO: 1382, and SEQ ID NO: 1539; SEQ ID NO: 755, SEQ ID NO: 912, SEQ ID NO: 1069, SEQ ID NO: 1226, SEQ ID NO: 1383, and SEQ ID NO: 1540; SEQ ID NO: 756, SEQ ID NO: 913, SEQ ID NO: 1070, SEQ ID NO: 1227, SEQ ID NO: 1384, and SEQ ID NO: 1541; SEQ ID NO: 757, SEQ ID NO: 914, SEQ ID NO: 1071, SEQ ID NO: 1228, SEQ ID NO: 1385, and SEQ ID NO: 1542; SEQ ID NO: 758, SEQ ID NO: 915, SEQ ID NO: 1072, SEQ ID NO: 1229, SEQ ID NO: 1386, and SEQ ID NO: 1543; SEQ ID NO: 759, SEQ ID NO: 916, SEQ ID NO: 1073, SEQ ID NO: 1230, SEQ ID NO: 1387, and SEQ ID NO: 1544; SEQ ID NO: 760, SEQ ID NO: 917, SEQ ID NO: 1074, SEQ ID NO: 1231, SEQ ID NO: 1388, and SEQ ID NO: 1545; SEQ ID NO: 761, SEQ ID NO: 918, SEQ ID NO: 1075, SEQ ID NO: 1232, SEQ ID NO: 1389, and SEQ ID NO: 1546; SEQ ID NO: 762, SEQ ID NO: 919, SEQ ID NO: 1076, SEQ ID NO: 1233, SEQ ID NO: 1390, and SEQ ID NO: 1547; SEQ ID NO: 763, SEQ ID NO: 920, SEQ ID NO: 1077, SEQ ID NO: 1234, SEQ ID NO: 1391, and SEQ ID NO: 1548; SEQ ID NO: 764, SEQ ID NO: 921, SEQ ID NO: 1078, SEQ ID NO: 1235, SEQ ID NO: 1392, and SEQ ID NO: 1549; SEQ ID NO: 765, SEQ ID NO: 922, SEQ ID NO: 1079, SEQ ID NO: 1236, SEQ ID NO: 1393, and SEQ ID NO: 1550; SEQ ID NO: 766, SEQ ID NO: 923, SEQ ID NO: 1080, SEQ ID NO: 1237, SEQ ID NO: 1394, and SEQ ID NO: 1551; SEQ ID NO: 767, SEQ ID NO: 924, SEQ ID NO: 1081, SEQ ID NO: 1238, SEQ ID NO: 1395, and SEQ ID NO: 1552; SEQ ID NO: 768, SEQ ID NO: 925, SEQ ID NO: 1082, SEQ ID NO: 1239, SEQ ID NO: 1396, and SEQ ID NO: 1553; SEQ ID NO: 769, SEQ ID NO: 926, SEQ ID NO: 1083, SEQ ID NO: 1240, SEQ ID NO: 1397, and SEQ ID NO: 1554; SEQ ID NO: 770, SEQ ID NO: 927, SEQ ID NO: 1084, SEQ ID NO: 1241, SEQ ID NO: 1398, and SEQ ID NO: 1555; SEQ ID NO: 771, SEQ ID NO: 928, SEQ ID NO: 1085, SEQ ID NO: 1242, SEQ ID NO: 1399, and SEQ ID NO: 1556; SEQ ID NO: 772, SEQ ID NO: 929, SEQ ID NO: 1086, SEQ ID NO: 1243, SEQ ID NO: 1400, and SEQ ID NO: 1557; SEQ ID NO: 773, SEQ ID NO: 930, SEQ ID NO: 1087, SEQ ID NO: 1244, SEQ ID NO: 1401, and SEQ ID NO: 1558; SEQ ID NO: 774, SEQ ID NO: 931, SEQ ID NO: 1088, SEQ ID NO: 1245, SEQ ID NO: 1402, and SEQ ID NO: 1559; SEQ ID NO: 775, SEQ ID NO: 932, SEQ ID NO: 1089, SEQ ID NO: 1246, SEQ ID NO: 1403, and SEQ ID NO: 1560; SEQ ID NO: 776, SEQ ID NO: 933, SEQ ID NO: 1090, SEQ ID NO: 1247, SEQ ID NO: 1404, and SEQ ID NO: 1561; SEQ ID NO: 777, SEQ ID NO: 934, SEQ ID NO: 1091, SEQ ID NO: 1248, SEQ ID NO: 1405, and SEQ ID NO: 1562; SEQ ID NO: 778, SEQ ID NO: 935, SEQ ID NO: 1092, SEQ ID NO: 1249, SEQ ID NO: 1406, and SEQ ID NO: 1563; SEQ ID NO: 779, SEQ ID NO: 936, SEQ ID NO: 1093, SEQ ID NO: 1250, SEQ ID NO: 1407, and SEQ ID NO: 1564; SEQ ID NO: 780, SEQ ID NO: 937, SEQ ID NO: 1094, SEQ ID NO: 1251, SEQ ID NO: 1408, and SEQ ID NO: 1565; SEQ ID NO: 781, SEQ ID NO: 938, SEQ ID NO: 1095, SEQ ID NO: 1252, SEQ ID NO: 1409, and SEQ ID NO: 1566; SEQ ID NO: 782, SEQ ID NO: 939, SEQ ID NO: 1096, SEQ ID NO: 1253, SEQ ID NO: 1410, and SEQ ID NO: 1567; SEQ ID NO: 783, SEQ ID NO: 940, SEQ ID NO: 1097, SEQ ID NO: 1254, SEQ ID NO: 1411, and SEQ ID NO: 1568; SEQ ID NO: 784, SEQ ID NO: 941, SEQ ID NO: 1098, SEQ ID NO: 1255, SEQ ID NO: 1412, and SEQ ID NO: 1569; and SEQ ID NO: 785, SEQ ID NO: 942, SEQ ID NO: 1099, SEQ ID NO: 1256, SEQ ID NO: 1413, and SEQ ID NO: 1570, wherein
[0028] the antibody or functional fragment thereof comprises a cysteine or non-canonical amino acid amino acid substitution at one or more conjugation site(s) selected from the group consisting of
[0029] D70 of the antibody light chain relative to reference sequence SEQ ID NO: 455,
[0030] E276 of the antibody heavy chain relative to reference sequence SEQ ID NO: 612, and
[0031] T363 of the antibody heavy chain relative to reference sequence SEQ ID NO: 612.

[0032] In one embodiment, the antibody comprises a light chain variable region comprising a sequence selected from the group consisting of SEQ ID NOs: 1-157 and a heavy chain variable region comprising a sequence selected from the group consisting of SEQ ID NOs: 158-314, wherein
[0033] the antibody or functional fragment thereof comprises a cysteine or non-canonical amino acid amino acid substitution at one or more conjugation site(s) selected from the group consisting of
[0034] D70 of the antibody light chain relative to reference sequence SEQ ID NO: 455,
[0035] E276 of the antibody heavy chain relative to reference sequence SEQ ID NO: 612, and
[0036] T363 of the antibody heavy chain relative to reference sequence SEQ ID NO: 612.

[0037] In one embodiment, the antibody comprises a combination of a light chain variable region and a heavy chain variable region selected from the group consisting of a light chain variable region comprising SEQ ID NO: 1 and a heavy chain variable region comprising SEQ ID NO: 158; a light chain variable region comprising SEQ ID NO: 2 and a heavy chain variable region comprising SEQ ID NO: 159; a light chain variable region comprising SEQ ID NO: 3 and a heavy chain variable region comprising SEQ ID NO: 160; a light chain variable region comprising SEQ ID NO: 4 and a heavy chain variable region comprising SEQ ID NO: 161; a light chain variable region comprising SEQ ID NO: 5 and a heavy chain variable region comprising SEQ ID NO: 162; a light chain variable region comprising SEQ ID NO: 6 and a heavy chain variable region comprising SEQ ID NO: 163; a light chain variable region comprising SEQ ID NO: 7 and a heavy chain variable region comprising SEQ ID NO: 164; a light chain variable region comprising SEQ ID NO: 8 and a heavy chain variable region comprising SEQ ID NO: 165; a light chain variable region comprising SEQ ID NO: 9 and a heavy chain variable region comprising SEQ ID NO: 166; a light chain variable region comprising SEQ ID NO: 10 and a heavy chain variable region comprising SEQ ID NO: 167; a light chain variable region comprising SEQ ID NO: 11 and a heavy chain variable region comprising SEQ ID NO: 168; a light chain variable region comprising SEQ ID NO: 12 and a heavy chain variable region comprising SEQ ID NO: 169; a light chain variable region comprising SEQ ID NO: 13 and a heavy chain variable region comprising SEQ ID NO: 170; a light chain variable region comprising SEQ ID NO: 14 and a heavy chain variable region comprising SEQ ID NO: 171; a light chain variable region comprising SEQ ID NO: 15 and a heavy chain variable region comprising SEQ ID NO: 172; a light chain variable region comprising SEQ ID NO: 16 and a heavy chain variable region comprising SEQ ID NO: 173; a light chain variable region comprising SEQ ID NO: 17 and a heavy chain variable region comprising SEQ ID NO: 174; a light chain variable region comprising SEQ ID NO: 18 and a heavy chain variable region comprising SEQ ID NO: 175; a light chain variable region comprising SEQ ID NO: 19 and a heavy chain variable region comprising SEQ ID NO: 176; a light chain variable region comprising SEQ ID NO: 20 and a heavy chain variable region comprising SEQ ID NO: 177; a light chain variable region comprising SEQ ID NO: 21 and a heavy chain variable region comprising SEQ ID NO: 178; a light chain variable region comprising SEQ ID NO: 22 and a heavy chain variable region comprising SEQ ID NO: 179; a light chain variable region comprising SEQ ID NO: 23 and a heavy chain variable region comprising SEQ ID NO: 180; a light chain variable region comprising SEQ ID NO: 24 and a heavy chain variable region comprising SEQ ID NO: 181; a light chain variable region comprising SEQ ID NO: 25 and a heavy chain variable region comprising SEQ ID NO: 182; a light chain variable region comprising SEQ ID NO: 26 and a heavy chain variable region comprising SEQ ID NO: 183; a light chain variable region comprising SEQ ID NO: 27 and a heavy chain variable region comprising SEQ ID NO: 184; a light chain variable region comprising SEQ ID NO: 28 and a heavy chain variable region comprising SEQ ID NO: 185; a light chain variable region comprising SEQ ID NO: 29 and a heavy chain variable region comprising SEQ ID NO: 186; a light chain variable region comprising SEQ ID NO: 30 and a heavy chain variable region comprising SEQ ID NO: 187; a light chain variable region comprising SEQ ID NO: 31 and a heavy chain variable region comprising SEQ ID NO: 188; a light chain variable region comprising SEQ ID NO: 32 and a heavy chain variable region comprising SEQ ID NO: 189; a light chain variable region comprising SEQ ID NO: 33 and a heavy chain variable region comprising SEQ ID NO: 190; a light chain variable region comprising SEQ ID NO: 34 and a heavy chain variable region comprising SEQ ID NO: 191; a light chain variable region comprising SEQ ID NO: 35 and a heavy chain variable region comprising SEQ ID NO: 192; a light chain variable region comprising SEQ ID NO: 36 and a heavy chain variable region comprising SEQ ID NO: 193; a light chain variable region comprising SEQ ID NO: 37 and a heavy chain variable region comprising SEQ ID NO: 194; a light chain variable region comprising SEQ ID NO: 38 and a heavy chain variable region comprising SEQ ID NO: 195; a light chain variable region comprising SEQ ID NO: 39 and a heavy chain variable region comprising SEQ ID NO: 1%; a light chain variable region comprising SEQ ID NO: 40 and a heavy chain variable region comprising SEQ ID NO: 197; a light chain variable region comprising SEQ ID NO: 41 and a heavy chain variable region comprising SEQ ID NO: 198; a light chain variable region comprising SEQ ID NO: 42 and a heavy chain variable region comprising SEQ ID NO: 199; a light chain variable region comprising SEQ ID NO: 43 and a heavy chain variable region comprising SEQ ID NO: 200; a light chain variable region comprising SEQ ID NO: 44 and a heavy chain variable region comprising SEQ ID NO: 201; a light chain variable region comprising SEQ ID NO: 45 and a heavy chain variable region comprising SEQ ID NO: 202; a light chain variable region comprising SEQ ID NO: 46 and a heavy chain variable region comprising SEQ ID NO: 203; a light chain variable region comprising SEQ ID NO: 47 and a heavy chain variable region comprising SEQ ID NO: 204; a light chain variable region comprising SEQ ID NO: 48 and a heavy chain variable region comprising SEQ ID NO: 205; a light chain variable region comprising SEQ ID NO: 49 and a heavy chain variable region comprising SEQ ID NO: 206; a light chain variable region comprising SEQ ID NO: 50 and a heavy chain variable region comprising SEQ ID NO: 207; a light chain variable region comprising SEQ ID NO: 51 and a heavy chain variable region comprising SEQ ID NO: 208; a light chain variable region comprising SEQ ID NO: 52 and a heavy chain variable region comprising SEQ ID NO: 209; a light chain variable region comprising SEQ ID NO: 53 and a heavy chain variable region comprising SEQ ID NO: 210; a light chain variable region comprising SEQ ID NO: 54 and a heavy chain variable region comprising SEQ ID NO: 211; a light chain variable region comprising SEQ ID NO: 55 and a heavy chain variable region comprising SEQ ID NO: 212; a light chain variable region comprising SEQ ID NO: 56 and a heavy chain variable region comprising SEQ ID NO: 213; a light chain variable region comprising SEQ ID NO: 57 and a heavy chain variable region comprising SEQ ID NO: 214; a light chain variable region comprising SEQ ID NO: 58 and a heavy chain variable region comprising SEQ ID NO: 215; a light chain variable region comprising SEQ ID NO: 59 and a heavy chain variable region comprising SEQ ID NO: 216; a light chain variable region comprising SEQ ID NO: 60 and a heavy chain variable region comprising SEQ ID NO: 217; a light chain variable region comprising SEQ ID NO: 61 and a heavy chain variable region comprising SEQ ID NO: 218; a light chain variable region comprising SEQ ID NO: 62 and a heavy chain variable region comprising SEQ ID NO: 219; a light chain variable region comprising SEQ ID NO: 63 and a heavy chain variable region comprising SEQ ID NO: 220; a light chain variable region comprising SEQ ID NO: 64 and a heavy chain variable region comprising SEQ ID NO: 221; a light chain variable region comprising SEQ ID NO: 65 and a heavy chain variable region comprising SEQ ID NO: 222; a light chain variable region comprising SEQ ID NO: 66 and a heavy chain variable region comprising SEQ ID NO: 223; a light chain variable region comprising SEQ ID NO: 67 and a heavy chain variable region comprising SEQ ID NO: 224; a light chain variable region comprising SEQ ID NO: 68 and a heavy chain variable region comprising SEQ ID NO: 225; a light chain variable region comprising SEQ ID NO: 69 and a heavy chain variable region comprising SEQ ID NO: 226; a light chain variable region comprising SEQ ID NO: 70 and a heavy chain variable region comprising SEQ ID NO: 227; a light chain variable region comprising SEQ ID NO: 71 and a heavy chain variable region comprising SEQ ID NO: 228; a light chain variable region comprising SEQ ID NO: 72 and a heavy chain variable region comprising SEQ ID NO: 229; a light chain variable region comprising SEQ ID NO: 73 and a heavy chain variable region comprising SEQ ID NO: 230; a light chain variable region comprising SEQ ID NO: 74 and a heavy chain variable region comprising SEQ ID NO: 231; a light chain variable region comprising SEQ ID NO: 75 and a heavy chain variable region comprising SEQ ID NO: 232; a light chain variable region comprising SEQ ID NO: 76 and a heavy chain variable region comprising SEQ ID NO: 233; a light chain variable region comprising SEQ ID NO: 77 and a heavy chain variable region comprising SEQ ID NO: 234; a light chain variable region comprising SEQ ID NO: 78 and a heavy chain variable region comprising SEQ ID NO: 235; a light chain variable region comprising SEQ ID NO: 79 and a heavy chain variable region comprising SEQ ID NO: 236; a light chain variable region comprising SEQ ID NO: 80 and a heavy chain variable region comprising SEQ ID NO: 237; a light chain variable region comprising SEQ ID NO: 81 and a heavy chain variable region comprising SEQ ID NO: 238; a light chain variable region comprising SEQ ID NO: 82 and a heavy chain variable region comprising SEQ ID NO: 239; a light chain variable region comprising SEQ ID NO: 83 and a heavy chain variable region comprising SEQ ID NO: 240; a light chain variable region comprising SEQ ID NO: 84 and a heavy chain variable region comprising SEQ ID NO: 241; a light chain variable region comprising SEQ ID NO: 85 and a heavy chain variable region comprising SEQ ID NO: 242; a light chain variable region comprising SEQ ID NO: 86 and a heavy chain variable region comprising SEQ ID NO: 243; a light chain variable region comprising SEQ ID NO: 87 and a heavy chain variable region comprising SEQ ID NO: 244; a light chain variable region comprising SEQ ID NO: 88 and a heavy chain variable region comprising SEQ ID NO: 245; a light chain variable region comprising SEQ ID NO: 89 and a heavy chain variable region comprising SEQ ID NO: 246; a light chain variable region comprising SEQ ID NO: 90 and a heavy chain variable region comprising SEQ ID NO: 247; a light chain variable region comprising SEQ ID NO: 91 and a heavy chain variable region comprising SEQ ID NO: 248; a light chain variable region comprising SEQ ID NO: 92 and a heavy chain variable region comprising SEQ ID NO: 249; a light chain variable region comprising SEQ ID NO: 93 and a heavy chain variable region comprising SEQ ID NO: 250; a light chain variable region comprising SEQ ID NO: 94 and a heavy chain variable region comprising SEQ ID NO: 251; a light chain variable region comprising SEQ ID NO: 95 and a heavy chain variable region comprising SEQ ID NO: 252; a light chain variable region comprising SEQ ID NO: 96 and a heavy chain variable region comprising SEQ ID NO: 253; a light chain variable region comprising SEQ ID NO: 97 and a heavy chain variable region comprising SEQ ID NO: 254; a light chain variable region comprising SEQ ID NO: 98 and a heavy chain variable region comprising SEQ ID NO: 255; a light chain variable region comprising SEQ ID NO: 99 and a heavy chain variable region comprising SEQ ID NO: 256; a light chain variable region comprising SEQ ID NO: 100 and a heavy chain variable region comprising SEQ ID NO: 257; a light chain variable region comprising SEQ ID NO: 101 and a heavy chain variable region comprising SEQ ID NO: 258; a light chain variable region comprising SEQ ID NO: 102 and a heavy chain variable region comprising SEQ ID NO: 259; a light chain variable region comprising SEQ ID NO: 103 and a heavy chain variable region comprising SEQ ID NO: 260; a light chain variable region comprising SEQ ID NO: 104 and a heavy chain variable region comprising SEQ ID NO: 261; a light chain variable region comprising SEQ ID NO: 105 and a heavy chain variable region comprising SEQ ID NO: 262; a light chain variable region comprising SEQ ID NO: 106 and a heavy chain variable region comprising SEQ ID NO: 263; a light chain variable region comprising SEQ ID NO: 107 and a heavy chain variable region comprising SEQ ID NO: 264; a light chain variable region comprising SEQ ID NO: 108 and a heavy chain variable region comprising SEQ ID NO: 265; a light chain variable region comprising SEQ ID NO: 109 and a heavy chain variable region comprising SEQ ID NO: 266; a light chain variable region comprising SEQ ID NO: 110 and a heavy chain variable region comprising SEQ ID NO: 267; a light chain variable region comprising SEQ ID NO: 111 and a heavy chain variable region comprising SEQ ID NO: 268; a light chain variable region comprising SEQ ID NO: 112 and a heavy chain variable region comprising SEQ ID NO: 269; a light chain variable region comprising SEQ ID NO: 113 and a heavy chain variable region comprising SEQ ID NO: 270; a light chain variable region comprising SEQ ID NO: 114 and a heavy chain variable region comprising SEQ ID NO: 271; a light chain variable region comprising SEQ ID NO: 115 and a heavy chain variable region comprising SEQ ID NO: 272; a light chain variable region comprising SEQ ID NO: 116 and a heavy chain variable region comprising SEQ ID NO: 273; a light chain variable region comprising SEQ ID NO: 117 and a heavy chain variable region comprising SEQ ID NO: 274; a light chain variable region comprising SEQ ID NO: 118 and a heavy chain variable region comprising SEQ ID NO: 275; a light chain variable region comprising SEQ ID NO: 119 and a heavy chain variable region comprising SEQ ID NO: 276; a light chain variable region comprising SEQ ID NO: 120 and a heavy chain variable region comprising SEQ ID NO: 277; a light chain variable region comprising SEQ ID NO: 121 and a heavy chain variable region comprising SEQ ID NO: 278; a light chain variable region comprising SEQ ID NO: 122 and a heavy chain variable region comprising SEQ ID NO: 279; a light chain variable region comprising SEQ ID NO: 123 and a heavy chain variable region comprising SEQ ID NO: 280; a light chain variable region comprising SEQ ID NO: 124 and a heavy chain variable region comprising SEQ ID NO: 281; a light chain variable region comprising SEQ ID NO: 125 and a heavy chain variable region comprising SEQ ID NO: 282; a light chain variable region comprising SEQ ID NO: 126 and a heavy chain variable region comprising SEQ ID NO: 283; a light chain variable region comprising SEQ ID NO: 127 and a heavy chain variable region comprising SEQ ID NO: 284; a light chain variable region comprising SEQ ID NO: 128 and a heavy chain variable region comprising SEQ ID NO: 285; a light chain variable region comprising SEQ ID NO: 129 and a heavy chain variable region comprising SEQ ID NO: 286; a light chain variable region comprising SEQ ID NO: 130 and a heavy chain variable region comprising SEQ ID NO: 287; a light chain variable region comprising SEQ ID NO: 131 and a heavy chain variable region comprising SEQ ID NO: 288; a light chain variable region comprising SEQ ID NO: 132 and a heavy chain variable region comprising SEQ ID NO: 289; a light chain variable region comprising SEQ ID NO: 133 and a heavy chain variable region comprising SEQ ID NO: 290; a light chain variable region comprising SEQ ID NO: 134 and a heavy chain variable region comprising SEQ ID NO: 291; a light chain variable region comprising SEQ ID NO: 135 and a heavy chain variable region comprising SEQ ID NO: 292; a light chain variable region comprising SEQ ID NO: 136 and a heavy chain variable region comprising SEQ ID NO: 293; a light chain variable region comprising SEQ ID NO: 137 and a heavy chain variable region comprising SEQ ID NO: 294; a light chain variable region comprising SEQ ID NO: 138 and a heavy chain variable region comprising SEQ ID NO: 295; a light chain variable region comprising SEQ ID NO: 139 and a heavy chain variable region comprising SEQ ID NO: 296; a light chain variable region comprising SEQ ID NO: 140 and a heavy chain variable region comprising SEQ ID NO: 297; a light chain variable region comprising SEQ ID NO: 141 and a heavy chain variable region comprising SEQ ID NO: 298; a light chain variable region comprising SEQ ID NO: 142 and a heavy chain variable region comprising SEQ ID NO: 299; a light chain variable region comprising SEQ ID NO: 143 and a heavy chain variable region comprising SEQ ID NO: 300; a light chain variable region comprising SEQ ID NO: 144 and a heavy chain variable region comprising SEQ ID NO: 301; a light chain variable region comprising SEQ ID NO: 145 and a heavy chain variable region comprising SEQ ID NO: 302; a light chain variable region comprising SEQ ID NO: 146 and a heavy chain variable region comprising SEQ ID NO: 303; a light chain variable region comprising SEQ ID NO: 147 and a heavy chain variable region comprising SEQ ID NO: 304; a light chain variable region comprising SEQ ID NO: 148 and a heavy chain variable region comprising SEQ ID NO: 305; a light chain variable region comprising SEQ ID NO: 149 and a heavy chain variable region comprising SEQ ID NO: 306; a light chain variable region comprising SEQ ID NO: 150 and a heavy chain variable region comprising SEQ ID NO: 307; a light chain variable region comprising SEQ ID NO: 151 and a heavy chain variable region comprising SEQ ID NO: 308; a light chain variable region comprising SEQ ID NO: 152 and a heavy chain variable region comprising SEQ ID NO: 309; a light chain variable region comprising SEQ ID NO: 153 and a heavy chain variable region comprising SEQ ID NO: 310; a light chain variable region comprising SEQ ID NO: 154 and a heavy chain variable region comprising SEQ ID NO: 311; a light chain variable region comprising SEQ ID NO: 155 and a heavy chain variable region comprising SEQ ID NO: 312; a light chain variable region comprising SEQ ID NO: 156 and a heavy chain variable region comprising SEQ ID NO: 313; and a light chain variable region comprising SEQ ID NO: 157 and a heavy chain variable region comprising SEQ ID NO: 314, wherein
[0038] the antibody or functional fragment thereof comprises a cysteine or non-canonical amino acid amino acid substitution at one or more conjugation site(s) selected from the group consisting of
[0039] D70 of the antibody light chain relative to reference sequence SEQ ID NO: 455,
[0040] E276 of the antibody heavy chain relative to reference sequence SEQ ID NO: 612, and
[0041] T363 of the antibody heavy chain relative to reference sequence SEQ ID NO: 612.

[0042] In one embodiment, the antibody comprises a light chain comprising a sequence selected from the group consisting of SEQ ID NOs: 315-471 and a heavy chain comprising a sequence selected from the group consisting of SEQ ID NOs: 472-628, wherein
[0043] the antibody or functional fragment thereof comprises a cysteine or non-canonical amino acid amino acid substitution at one or more conjugation site(s) selected from the group consisting of
[0044] D70 of the antibody light chain relative to reference sequence SEQ ID NO: 455,
[0045] E276 of the antibody heavy chain relative to reference sequence SEQ ID NO: 612, and
[0046] T363 of the antibody heavy chain relative to reference sequence SEQ ID NO: 612.

[0047] In one embodiment, the antibody comprises a combination of a light chain and a heavy chain selected from the group consisting of a light chain comprising SEQ ID NO: 315 and a heavy chain comprising SEQ ID NO: 472; a light chain comprising SEQ ID NO: 316 and a heavy chain comprising SEQ ID NO: 473; a light chain comprising SEQ ID NO: 317 and a heavy chain comprising SEQ ID NO: 474; a light chain comprising SEQ ID NO: 318 and a heavy chain comprising SEQ ID NO: 475; a light chain comprising SEQ ID NO: 319 and a heavy chain comprising SEQ ID NO: 476; a light chain comprising SEQ ID NO: 320 and a heavy chain comprising SEQ ID NO: 477; a light chain comprising SEQ ID NO: 321 and a heavy chain comprising SEQ ID NO: 478; a light chain comprising SEQ ID NO: 322 and a heavy chain comprising SEQ ID NO: 479; a light chain comprising SEQ ID NO: 323 and a heavy chain comprising SEQ ID NO: 480; a light chain comprising SEQ ID NO: 324 and a heavy chain comprising SEQ ID NO: 481; a light chain comprising SEQ ID NO: 325 and a heavy chain comprising SEQ ID NO: 482; a light chain comprising SEQ ID NO: 326 and a heavy chain comprising SEQ ID NO: 483; a light chain comprising SEQ ID NO: 327 and a heavy chain comprising SEQ ID NO: 484; a light chain comprising SEQ ID NO: 328 and a heavy chain comprising SEQ ID NO: 485; a light chain comprising SEQ ID NO: 329 and a heavy chain comprising SEQ ID NO: 486; a light chain comprising SEQ ID NO: 330 and a heavy chain comprising SEQ ID NO: 487; a light chain comprising SEQ ID NO: 331 and a heavy chain comprising SEQ ID NO: 488; a light chain comprising SEQ ID NO: 332 and a heavy chain comprising SEQ ID NO: 489; a light chain comprising SEQ ID NO: 333 and a heavy chain comprising SEQ ID NO: 490; a light chain comprising SEQ ID NO: 334 and a heavy chain comprising SEQ ID NO: 491; a light chain comprising SEQ ID NO: 335 and a heavy chain comprising SEQ ID NO: 492; a light chain comprising SEQ ID NO: 336 and a heavy chain comprising SEQ ID NO: 493; a light chain comprising SEQ ID NO: 337 and a heavy chain comprising SEQ ID NO: 494; a light chain comprising SEQ ID NO: 338 and a heavy chain comprising SEQ ID NO: 495; a light chain comprising SEQ ID NO: 339 and a heavy chain comprising SEQ ID NO: 496; a light chain comprising SEQ ID NO: 340 and a heavy chain comprising SEQ ID NO: 497; a light chain comprising SEQ ID NO: 341 and a heavy chain comprising SEQ ID NO: 498; a light chain comprising SEQ ID NO: 342 and a heavy chain comprising SEQ ID NO: 499; a light chain comprising SEQ ID NO: 343 and a heavy chain comprising SEQ ID NO: 500; a light chain comprising SEQ ID NO: 344 and a heavy chain comprising SEQ ID NO: 501; a light chain comprising SEQ ID NO: 345 and a heavy chain comprising SEQ ID NO: 502; a light chain comprising SEQ ID NO: 346 and a heavy chain comprising SEQ ID NO: 503; a light chain comprising SEQ ID NO: 347 and a heavy chain comprising SEQ ID NO: 504; a light chain comprising SEQ ID NO: 348 and a heavy chain comprising SEQ ID NO: 505; a light chain comprising SEQ ID NO: 349 and a heavy chain comprising SEQ ID NO: 506; a light chain comprising SEQ ID NO: 350 and a heavy chain comprising SEQ ID NO: 507; a light chain comprising SEQ ID NO: 351 and a heavy chain comprising SEQ ID NO: 508; a light chain comprising SEQ ID NO: 352 and a heavy chain comprising SEQ ID NO: 509; a light chain comprising SEQ ID NO: 353 and a heavy chain comprising SEQ ID NO: 510; a light chain comprising SEQ ID NO: 354 and a heavy chain comprising SEQ ID NO: 511; a light chain comprising SEQ ID NO: 355 and a heavy chain comprising SEQ ID NO: 512; a light chain comprising SEQ ID NO: 356 and a heavy chain comprising SEQ ID NO: 513; a light chain comprising SEQ ID NO: 357 and a heavy chain comprising SEQ ID NO: 514; a light chain comprising SEQ ID NO: 358 and a heavy chain comprising SEQ ID NO: 515; a light chain comprising SEQ ID NO: 359 and a heavy chain comprising SEQ ID NO: 516; a light chain comprising SEQ ID NO: 360 and a heavy chain comprising SEQ ID NO: 517; a light chain comprising SEQ ID NO: 361 and a heavy chain comprising SEQ ID NO: 518; a light chain comprising SEQ ID NO: 362 and a heavy chain comprising SEQ ID NO: 519; a light chain comprising SEQ ID NO: 363 and a heavy chain comprising SEQ ID NO: 520; a light chain comprising SEQ ID NO: 364 and a heavy chain comprising SEQ ID NO: 521; a light chain comprising SEQ ID NO: 365 and a heavy chain comprising SEQ ID NO: 522; a light chain comprising SEQ ID NO: 366 and a heavy chain comprising SEQ ID NO: 523; a light chain comprising SEQ ID NO: 367 and a heavy chain comprising SEQ ID NO: 524; a light chain comprising SEQ ID NO: 368 and a heavy chain comprising SEQ ID NO: 525; a light chain comprising SEQ ID NO: 369 and a heavy chain comprising SEQ ID NO: 526; a light chain comprising SEQ ID NO: 370 and a heavy chain comprising SEQ ID NO: 527; a light chain comprising SEQ ID NO: 371 and a heavy chain comprising SEQ ID NO: 528; a light chain comprising SEQ ID NO: 372 and a heavy chain comprising SEQ ID NO: 529; a light chain comprising SEQ ID NO: 373 and a heavy chain comprising SEQ ID NO: 530; a light chain comprising SEQ ID NO: 374 and a heavy chain comprising SEQ ID NO: 531; a light chain comprising SEQ ID NO: 375 and a heavy chain comprising SEQ ID NO: 532; a light chain comprising SEQ ID NO: 376 and a heavy chain comprising SEQ ID NO: 533; a light chain comprising SEQ ID NO: 377 and a heavy chain comprising SEQ ID NO: 534; a light chain comprising SEQ ID NO: 378 and a heavy chain comprising SEQ ID NO: 535; a light chain comprising SEQ ID NO: 379 and a heavy chain comprising SEQ ID NO: 536; a light chain comprising SEQ ID NO: 380 and a heavy chain comprising SEQ ID NO: 537; a light chain comprising SEQ ID NO: 381 and a heavy chain comprising SEQ ID NO: 538; a light chain comprising SEQ ID NO: 382 and a heavy chain comprising SEQ ID NO: 539; a light chain comprising SEQ ID NO: 383 and a heavy chain comprising SEQ ID NO: 540; a light chain comprising SEQ ID NO: 384 and a heavy chain comprising SEQ ID NO: 541; a light chain comprising SEQ ID NO: 385 and a heavy chain comprising SEQ ID NO: 542; a light chain comprising SEQ ID NO: 386 and a heavy chain comprising SEQ ID NO: 543; a light chain comprising SEQ ID NO: 387 and a heavy chain comprising SEQ ID NO: 544; a light chain comprising SEQ ID NO: 388 and a heavy chain comprising SEQ ID NO: 545; a light chain comprising SEQ ID NO: 389 and a heavy chain comprising SEQ ID NO: 546; a light chain comprising SEQ ID NO: 390 and a heavy chain comprising SEQ ID NO: 547; a light chain comprising SEQ ID NO: 391 and a heavy chain comprising SEQ ID NO: 548; a light chain comprising SEQ ID NO: 392 and a heavy chain comprising SEQ ID NO: 549; a light chain comprising SEQ ID NO: 393 and a heavy chain comprising SEQ ID NO: 550; a light chain comprising SEQ ID NO: 394 and a heavy chain comprising SEQ ID NO: 551; a light chain comprising SEQ ID NO: 395 and a heavy chain comprising SEQ ID NO: 552; a light chain comprising SEQ ID NO: 396 and a heavy chain comprising SEQ ID NO: 553; a light chain comprising SEQ ID NO: 397 and a heavy chain comprising SEQ ID NO: 554; a light chain comprising SEQ ID NO: 398 and a heavy chain comprising SEQ ID NO: 555; a light chain comprising SEQ ID NO: 399 and a heavy chain comprising SEQ ID NO: 556; a light chain comprising SEQ ID NO: 400 and a heavy chain comprising SEQ ID NO: 557; a light chain comprising SEQ ID NO: 401 and a heavy chain comprising SEQ ID NO: 558; a light chain comprising SEQ ID NO: 402 and a heavy chain comprising SEQ ID NO: 559; a light chain comprising SEQ ID NO: 403 and a heavy chain comprising SEQ ID NO: 560; a light chain comprising SEQ ID NO: 404 and a heavy chain comprising SEQ ID NO: 561; a light chain comprising SEQ ID NO: 405 and a heavy chain comprising SEQ ID NO: 562; a light chain comprising SEQ ID NO: 406 and a heavy chain comprising SEQ ID NO: 563; a light chain comprising SEQ ID NO: 407 and a heavy chain comprising SEQ ID NO: 564; a light chain comprising SEQ ID NO: 408 and a heavy chain comprising SEQ ID NO: 565; a light chain comprising SEQ ID NO: 409 and a heavy chain comprising SEQ ID NO: 566; a light chain comprising SEQ ID NO: 410 and a heavy chain comprising SEQ ID NO: 567; a light chain comprising SEQ ID NO: 411 and a heavy chain comprising SEQ ID NO: 568; a light chain comprising SEQ ID NO: 412 and a heavy chain comprising SEQ ID NO: 569; a light chain comprising SEQ ID NO: 413 and a heavy chain comprising SEQ ID NO: 570; a light chain comprising SEQ ID NO: 414 and a heavy chain comprising SEQ ID NO: 571; a light chain comprising SEQ ID NO: 415 and a heavy chain comprising SEQ ID NO: 572; a light chain comprising SEQ ID NO: 416 and a heavy chain comprising SEQ ID NO: 573; a light chain comprising SEQ ID NO: 417 and a heavy chain comprising SEQ ID NO: 574; a light chain comprising SEQ ID NO: 418 and a heavy chain comprising SEQ ID NO: 575; a light chain comprising SEQ ID NO: 419 and a heavy chain comprising SEQ ID NO: 576; a light chain comprising SEQ ID NO: 420 and a heavy chain comprising SEQ ID NO: 577; a light chain comprising SEQ ID NO: 421 and a heavy chain comprising SEQ ID NO: 578; a light chain comprising SEQ ID NO: 422 and a heavy chain comprising SEQ ID NO: 579; a light chain comprising SEQ ID NO: 423 and a heavy chain comprising SEQ ID NO: 580; a light chain comprising SEQ ID NO: 424 and a heavy chain comprising SEQ ID NO: 581; a light chain comprising SEQ ID NO: 425 and a heavy chain comprising SEQ ID NO: 582; a light chain comprising SEQ ID NO: 426 and a heavy chain comprising SEQ ID NO: 583; a light chain comprising SEQ ID NO: 427 and a heavy chain comprising SEQ ID NO: 584; a light chain comprising SEQ ID NO: 428 and a heavy chain comprising SEQ ID NO: 585; a light chain comprising SEQ ID NO: 429 and a heavy chain comprising SEQ ID NO: 586; a light chain comprising SEQ ID NO: 430 and a heavy chain comprising SEQ ID NO: 587; a light chain comprising SEQ ID NO: 431 and a heavy chain comprising SEQ ID NO: 588; a light chain comprising SEQ ID NO: 432 and a heavy chain comprising SEQ ID NO: 589; a light chain comprising SEQ ID NO: 433 and a heavy chain comprising SEQ ID NO: 590; a light chain comprising SEQ ID NO: 434 and a heavy chain comprising SEQ ID NO: 591; a light chain comprising SEQ ID NO: 435 and a heavy chain comprising SEQ ID NO: 592; a light chain comprising SEQ ID NO: 436 and a heavy chain comprising SEQ ID NO: 593; a light chain comprising SEQ ID NO: 437 and a heavy chain comprising SEQ ID NO: 594; a light chain comprising SEQ ID NO: 438 and a heavy chain comprising SEQ ID NO: 595; a light chain comprising SEQ ID NO: 439 and a heavy chain comprising SEQ ID NO: 596; a light chain comprising SEQ ID NO: 440 and a heavy chain comprising SEQ ID NO: 597; a light chain comprising SEQ ID NO: 441 and a heavy chain comprising SEQ ID NO: 598; a light chain comprising SEQ ID NO: 442 and a heavy chain comprising SEQ ID NO: 599; a light chain comprising SEQ ID NO: 443 and a heavy chain comprising SEQ ID NO: 600; a light chain comprising SEQ ID NO: 444 and a heavy chain comprising SEQ ID NO: 601; a light chain comprising SEQ ID NO: 445 and a heavy chain comprising SEQ ID NO: 602; a light chain comprising SEQ ID NO: 446 and a heavy chain comprising SEQ ID NO: 603; a light chain comprising SEQ ID NO: 447 and a heavy chain comprising SEQ ID NO: 604; a light chain comprising SEQ ID NO: 448 and a heavy chain comprising SEQ ID NO: 605; a light chain comprising SEQ ID NO: 449 and a heavy chain comprising SEQ ID NO: 606; a light chain comprising SEQ ID NO: 450 and a heavy chain comprising SEQ ID NO: 607; a light chain comprising SEQ ID NO: 451 and a heavy chain comprising SEQ ID NO: 608; a light chain comprising SEQ ID NO: 452 and a heavy chain comprising SEQ ID NO: 609; a light chain comprising SEQ ID NO: 453 and a heavy chain comprising SEQ ID NO: 610; a light chain comprising SEQ ID NO: 454 and a heavy chain comprising SEQ ID NO: 611; a light chain comprising SEQ ID NO: 455 and a heavy chain comprising SEQ ID NO: 612; a light chain comprising SEQ ID NO: 456 and a heavy chain comprising SEQ ID NO: 613; a light chain comprising SEQ ID NO: 457 and a heavy chain comprising SEQ ID NO: 614; a light chain comprising SEQ ID NO: 458 and a heavy chain comprising SEQ ID NO: 615; a light chain comprising SEQ ID NO: 459 and a heavy chain comprising SEQ ID NO: 616; a light chain comprising SEQ ID NO: 460 and a heavy chain comprising SEQ ID NO: 617; a light chain comprising SEQ ID NO: 461 and a heavy chain comprising SEQ ID NO: 618; a light chain comprising SEQ ID NO: 462 and a heavy chain comprising SEQ ID NO: 619; a light chain comprising SEQ ID NO: 463 and a heavy chain comprising SEQ ID NO: 620; a light chain comprising SEQ ID NO: 464 and a heavy chain comprising SEQ ID NO: 621; a light chain comprising SEQ ID NO: 465 and a heavy chain comprising SEQ ID NO: 622; a light chain comprising SEQ ID NO: 466 and a heavy chain comprising SEQ ID NO: 623; a light chain comprising SEQ ID NO: 467 and a heavy chain comprising SEQ ID NO: 624; a light chain comprising SEQ ID NO: 468 and a heavy chain comprising SEQ ID NO: 625; a light chain comprising SEQ ID NO: 469 and a heavy chain comprising SEQ ID NO: 626; a light chain comprising SEQ ID NO: 470 and a heavy chain comprising SEQ ID NO: 627; and a light chain comprising SEQ ID NO: 471 and a heavy chain comprising SEQ ID NO: 628, wherein
[0048] the antibody or functional fragment thereof comprises a cysteine or non-canonical amino acid amino acid substitution at one or more conjugation site(s) selected from the group consisting of
[0049] D70 of the antibody light chain relative to reference sequence SEQ ID NO: 455,
[0050] E276 of the antibody heavy chain relative to reference sequence SEQ ID NO: 612, and
[0051] T363 of the antibody heavy chain relative to reference sequence SEQ ID NO: 612.

[0052] In one embodiment, the peptide is a GLP-1 receptor agonist is GLP-1(7-37) or a GLP-1(7-37) analog.

[0053] In one embodiment, the peptide is a GLP-1 receptor agonist selected from the group consisting of exenatide, liraglutide, lixisenatide, albiglutide, dulaglutide, semaglutide, and taspoglutide.

[0054] In one embodiment, the peptide is a GLP-1 receptor agonist selected from the group consisting of GLP-1(7-37) (SEQ ID NO: 3184); GLP-1(7-36)-NH₂ (SEQ ID NO: 3185); liraglutide; albiglutide; taspoglutide: dulaglutide, semaglutide: LY2428757; Exendin-4 (SEQ ID NO: 3163); Exendin-3 (SEQ ID NO: 3164); Leu¹⁴-exendin-4 (SEQ ID NO: 3165); Leu¹⁴,Phe²⁵-exendin-4 (SEQ ID NO: 3166); Leu¹⁴,Ala¹⁹,Phe²⁵-exendin-4 (SEQ ID NO: 3167); exendin-4(1-30) (SEQ ID NO: 3168); Leu¹⁴-exendin-4(1-30) (SEQ ID NO: 3169); Leu¹⁴,Phe²⁵-exendin-4(1-30) (SEQ ID NO: 3170); Leu¹⁴,Ala¹⁹,Phe²⁵-exendin-4(1-30) (SEQ ID NO: 3171); exendin-4(1-28) (SEQ ID NO: 3172); Leu¹⁴-exendin-4(1-28) (SEQ ID NO: 3173); Leu¹⁴,Phe²⁵-exendin-4(1-28) (SEQ ID NO: 3174); Leu¹⁴,Ala¹⁹,Phe²⁵-exendin-4 (1-28) (SEQ ID NO: 3175); Leu¹⁴,Lys^{17,20},Ala¹⁹,Glu²¹,Phe²⁵,Gln²⁸-exendin-4 (SEQ ID NO: 3176); Leu¹⁴,Lys^{17,20},Ala¹⁹,Glu²¹,Gln²⁸-exendin-4 (SEQ ID NO: 3177); octylGly¹⁴,Gln²⁸-exendin-4 (SEQ ID NO: 3178); Leu¹⁴,Gln²⁸,octylGly³⁴-exendin-4 (SEQ ID NO: 3179); Phe⁴,Leu¹⁴,Gln²⁸,Lys³³,Glu³⁴, Ile^{35,36},Ser³⁷-exendin-4(1-37) (SEQ ID NO: 3180); Phe⁴,Leu¹⁴,Lys^{17,20},Ala¹⁹,Glu²¹,Gln²⁸-exendin-4 (SEQ ID NO: 3181); Val¹¹,Ile¹³,Leu¹⁴,Ala¹⁶,Lys²¹,Phe²⁵-exendin-4 (SEQ ID NO: 3182); exendin-4-Lys⁴⁰ (SEQ ID NO: 3183); GLP-1(7-37) (SEQ ID NO: 3184); GLP-1(7-36)-NH₂ (SEQ ID NO: 3185); Aib^{8,35},Arg^{26,34},Phe³¹-GLP-1(7-36)) (SEQ ID NO: 3186); HXaa₈EGTFTSDVSSYLEXaa₂₂Xaa₂₃AAKEFIXaa₃₀WLXaa₃₃Xaa₃₄Xaa₃₆Xaa₃₇; wherein Xaa₈ is A, V, or G; Xaa₂₂ is G, K, or E; Xaa₂₃ is Q or K; Xaa₃₀ is A or E; Xaa₃₃ is V or K; Xaa₃₄ is K, N, or R; Xaa₃₆ is R or G; and Xaa₃₇ is G, H, P, or absent (SEQ ID NO: 3187); Arg³⁴-GLP-1(7-37) (SEQ ID NO: 3188); Glu³⁰-GLP-1(7-37) (SEQ ID NO: 3189); Lys²²-GLP-1(7-37) (SEQ ID NO: 3190); Gly^{8,36},Glu²²-GLP-1(7-37) (SEQ ID NO: 3191); Val⁸,Glu²²,Gly³⁶-GLP-1(7-37) (SEQ ID NO: 3192); Gly^{8,36},Glu²²,Lys³³,Asn³⁴-GLP-1(7-37) (SEQ ID NO: 3193); Val⁸,Glu²²,Lys³³,Asn³³,Gly³⁶-GLP-1(7-37) (SEQ ID NO: 3194); Gly^{8,36},Glu²²,Pro³⁷-GLP-1(7-37) (SEQ ID NO: 3195); Val⁸,Glu²²,Gly³⁶,Pro³⁷-GLP-1(7-37) (SEQ ID NO: 3196); Gly^{8,36},Glu²²,Lys³³, Asn³⁴,Pro³⁷-GLP-1(7-37) (SEQ ID NO: 3197); Val⁸,Glu²²,Lys³³,Asn³⁴,Gy³⁶,Pro³⁷-GLP-1(7-37) (SEQ ID NO: 3198); Gy^{8,36},Glu²²-GLP-1(7-36) (SEQ ID NO: 3199); Val⁸,Glu²²,Gly³⁶-GLP-1(7-36) (SEQ ID NO: 3200); Val⁸,Glu²²,Asn³⁴,Gly³⁶-GLP-1(7-36) (SEQ ID NO: 3201); Gly^{8,36},Glu²²,Asn³⁴-GLP-1(7-36) (SEQ ID NO: 3202); GLP-1 analog (SEQ ID NO: 3206); GLP-1 analog (SEQ ID NO: 3207); [N^{e}-(17-carboxyheptadecanoic acid)Lys²⁰]exendin-4-NH₂ (SEQ ID NO: 3208); [N^{e}-(17-carboxyhepta-decanoyl)Lys³²]exendin-4-NH₂ (SEQ ID NO: 3209); [desamino-His¹,N^{e}-(17-carboxyheptadecanoyl)Lys²⁰]exendin-4-NH₂ (SEQ ID NO: 3210); [Arg^{12,27},NLe¹⁴,N^{e}-(17-carboxy-heptadecanoyl)Lys³²]exendin-4-NH₂ (SEQ ID NO: 3211); [N^{e}-(19-carboxy-nonadecanoylamino)Lys²⁰]-exendin-4-NH₂ (SEQ ID NO: 3212); [N^{e}-(15-carboxypentadecanoylamino)Lys²⁰-exendin-4-NH₂ (SEQ ID NO: 3213); [N^{e}-(13-carboxytridecanoylamino)Lys²⁰]exendin-4-NH₂ (SEQ ID NO: 3214); [N-(11-carboxy-undecanoyl-amino)Lys²⁰]exendin-4-NH₂ (SEQ ID NO: 3215); exendin-4-Lys⁴⁰(e-MPA)-NH₂ (SEQ ID NO: 3216); exendin-4-Lys⁴⁰(e-AEEA-AEEA-MPA)-NH₂ (SEQ ID NO: 3217); exendin-4-Lys⁴⁰(e-AEEA-MPA)-NH₂ (SEQ ID NO: 3218); exendin-4-Lys⁴⁰(e-MPA)-albumin (SEQ ID NO: 3219); exendin-4-Lys⁴⁰(e-AEEA-AEEA-MPA)-albumin (SEQ ID NO: 3220); exendin-4-Lys⁴⁰(e-AEEA-MPA)-albumin (SEQ ID NO: 3221); desamino-His⁷,Arg²⁶,Lys²⁶(N^{e}-(γ-Glu(N-α-hexadecanoyl)))-GLP-1(7-37) (core peptide disclosed as SEQ ID NO: 3222) (SEQ ID NO: 3222); desamino-His⁷,Arg²⁶,Lys³⁴(N^{e}-octanoyl)-GLP-1(7-37) (SEQ ID NO: 3223); Arg^{26,34},Lys³⁸(N^{e}-(ω-carboxypentadecanoyl))-GLP-1(7-38) (SEQ ID NO: 3224); Arg^{26,34},Lys³⁶(N^{e}-(γ-Glu(N-α-hexadecanoyl)))-GLP-1(7-36) (core peptide disclosed as SEQ ID NO: 3225) (SEQ ID NO: 3225); [Aib⁸;Lys³⁷GLP-1_(7-37) (SEQ ID NO: 3226); [Aib⁸, Lys²⁶]GLP-1_(7-37) (SEQ ID NO: 3227); [Aib^{8,22},Lys³⁶GLP-1(7-36)-Amide (SEQ ID NO: 3228); [Aib^{8,22};BLeu¹²;Lys³⁶]GLP-1(7-36)-Amide (SEQ ID NO: 3229); [Aib^{8,22};Lys³⁷]GLP-1(7-37)-Amide (SEQ ID NO: 3230); [Aib^{8,22};BLeu³²;Lys³⁷]GLP-1(7-37)-Amide (SEQ ID NO: 3231); [Aib^{8,22};aMeLeu³²;Lys³⁷]GLP-1(7-37)-Amide (SEQ ID NO: 3232); [Aib^{8,22};AMEF¹²;Lys³⁷“GLP-1(7-37)-Amide (SEQ ID NO: 3233); [Aib^{8,22};BLeu¹⁶;Lys³⁷]GLP-1(7-37)-Amide (SEQ ID NO: 3234); [Aib^{8,22};Gly³⁶;Lys³⁷]GLP-1(7-37)-Amide (SEQ ID NO: 3235); [Aib^{8,22};Lys^{33,37};Asn³⁴;Gly³⁶]GLP-1(7-37)-Amide (SEQ ID NO: 3236); [Aib^{8,22}:Lys³³;Asn³⁴;Gly³⁶;Acea³⁷]GLP-1(7-37)-Acea-Lys-Amide (SEQ ID NO: 3237); [Aib^{8,22};Gly³⁶]GLP-1(7-37) (SEQ ID NO: 3238); cyclo[E²³-K²⁷][Aib⁸;Gly)]GLP-1(7-37) (SEQ ID NO: 3239); cyclo[E²²-K²⁶][Aib⁸;Gly³⁶;Lys³⁷]GLP-1(7-37)-Amide (SEQ ID NO: 3240); [Aib^{8,22}]-GLP-1(7-22)-Ex4(17-39) (SEQ ID NO: 3241); [Gly^{8,36};Glu²²]GLP-1(7-37) (SEQ ID NO: 3242); [Aib⁸;Glu²²;Gly³]GLP-1(7-37)-Amide (SEQ ID NO: 3243); [Aib⁸;Tyr¹⁶;Glu²;Gly³⁶]GLP-1_(7-37) (SEQ ID NO: 3244); [Aib⁸;Lys^{18,33};Glu^{22,23,30};Val²⁵;Arg²⁶;Leu²⁷;Asn³⁴;Gly³⁶]GLP-1(7-37) (SEQ ID NO: 3245); [Aib⁸;Lys^{18,33};Glu^{22,23,30};Val²⁷;Asn³⁴;Gly³⁶]GLP-1(7-37) (SEQ ID NO: 3246); [Aib⁸;Lys¹⁸;Glu^{22,23,30};Leu²⁷;Gy³⁶]GLP-1(7-37) (SEQ ID NO: 3247); [Aib^{8,22};Ile⁹;Gly³⁶]GLP-1_(7-36) (SEQ ID NO: 3248); and [Aib^{8,22};Glu¹⁵;Gly³⁶]GLP-1_(7-36) (SEQ ID NO: 3249).

[0055] In one embodiment, the peptide is a GLP-1(7-37) or GLP-1(7-37) analog conjugated to the antibody or fragment thereof at a residue that corresponds to K26, K36, K37, K39 or a C-terminal amine group of the analog.

[0056] In one embodiment, the peptide is conjugated to the via a peptide linker comprising a sequence selected from the group consisting of (Gly₃Ser)₂ (SEQ ID NO: 3350), (Gly₄Ser)₂ (SEQ ID NO: 3262), (Gly₃Ser)₃(SEQ ID NO:3352), (Gly₄Ser)₃ (SEQ ID NO: 3253), (Gly₃Ser)₄,(SEQ ID NO: 3353) (Gly₄Ser)₄ (SEQ ID NO:3263), (Gly₃Ser)₅(SEQ ID NO:3354), (Gly₄Ser)₅(SEQ ID NO: 3264), (Gly₃Ser)₆(SEQ ID NO:3356), (Gly₄Ser)₆ (SEQ ID NO: 3355) and GGGGSGGGGSGGGGSK (SEQ ID NO: 3351).

### DESCRIPTION OF THE DRAWINGS

[0057] FIG. 1 depicts the genotyping results for cathepsin D knockout clones. Clones with homozygous genotype (same indel mutation on all alleles) are shown. A total of 316 clones (156 for sgRNA #1 and 160 for sgRNA #2) were analyzed. Red, selected cathepsin D knockout clones. *, genotype includes insertions and deletions. **, genotype contains nucleotide substitutions. CTSD, cathepsin D. sgRNA, single-guide RNA.

[0058] FIG. 2 depicts Sanger sequencing results for selected cathepsin D clones. For each clone, the chromatogram is shown with the consensus nucleotide and amino acid sequence; the reference sequence is indicated below. sgRNA targeting site is indicated in gray for each clone. Results: clone #5-1 base-pair insertion; clone #7 1 base-pair deletion; clone #8-44 base-pair deletion; clone #9-188 base-pair insertion; clone #44-1 base-pair deletion. Each indel mutation leads to an early STOP codon (black). Bp, base-pair.

[0059] FIG. 3 depicts Cathepsin D mRNA transcript levels. Samples were taken from passaging cultures. Transcript levels were normalized relative to actin beta expression. Black, wild-type parent; red, selected cathepsin D knockout clone; gray, non-selected cathepsin D knockout clone. WT, wild-type. CTSD KO, cathepsin D knockout.

[0060] FIG. 4 depicts Cathepsin D protein levels. Samples were taken from passaging cultures. cathepsin D antibody was used to probe for intracellular cathepsin D expression in indicated cells. Actin antibody was used for loading control. Red, selected cathepsin D knockout clone. WT, wild-type. CTSD KO, cathepsin D knockout. *, non-specific band.

[0061] FIGS. 5A-5C depict 10-day fed-batch evaluation of cathepsin D knockout clones. Viable cell density (FIG. 5A) and viability (FIG. 5B) of indicated samples over 10-day fed-batch. Cultures were sampled on Day 0, 3, 6, 8, and 10. FIG. 5C) Day 10 titer results from fed-batch. Black, wild-type parent; red, selected cathepsin D knockout clone; gray, non-selected cathepsin D knockout clone. WT, wild-type. CTSD KO, cathepsin D knockout.

[0062] FIG. 6 depict in vitro cathepsin D activity. cathepsin D activity was assayed in vitro in anti-GIPR-purified samples from a 10-day fed-batch in small-scale 24-deep well plates. cathepsin D activity was normalized to a standard curve of purified cathepsin D. Bold, wild-type parent; red, selected cathepsin D knockout clone; black, non-selected cathepsin D knockout clone. WT, wild-type. CTSD KO, cathepsin D knockout. *NA indicates sample was not selected for analysis.

[0063] FIG. 7 depicts clonality images for selected cathepsin D knockout clones. 96-well export plates were imaged before single-cell sorting to confirm blank well, immediately after single-cell sorting to verify single-cell origin, and 14 days after single-cell sorting to ensure cell growth. Red box in DO image indicates single-cell location with zoomed-in inlet provided on right. Green staining in D14 image marks growing cells according to algorithm on Solentim Cell Metric Imager. CTSD KO, cathepsin D knockout.

### DETAILED DESCRIPTION OF THE INVENTION

[0064] The present disclosure provides mammalian cell lines engineered to have reduced or eliminated expression of cathepsin D such that antibodies produced by the cell lines have very low levels of contaminating cathepsin D protease. Methods for producing said engineered cell lines are provided, as well as methods of using said engineered cell lines to antibodies with low levels of residual cathepsin D.

[0065] The cell lines disclosed herein having reduced or eliminated expression of cathepsin D are genetically engineered to modify the chromosomal sequence encoding cathepsin D. Chromosomal sequences of interest can be modified using targeted endonuclease-mediated genomic editing techniques, which are detailed below. For example, chromosomal sequences can be modified to comprise a deletion of at least one nucleotide, an insertion of at least one nucleotide, a substitution of at least one nucleotide, or a combination thereof, such that the reading frame is shifted and no protein product is produced (i.e., the chromosomal sequence is inactivated). Inactivation of one allele of the chromosomal sequence encoding the cathepsin D of interest results in reduced expression (i.e., knock down) of the cathepsin D. Inactivation of both alleles of the chromosomal sequence encoding cathepsin D results in no expression (i.e., knock out) of cathepsin D. In one embodiment, one allele of cathepsin D is inactivated. In another embodiment, both alleles of cathepsin D are inactivated.

[0066] The engineered cell lines disclosed herein are mammalian cell lines. In some embodiments, the engineered cell lines can be derived from human cell lines. Non-limiting examples of suitable human cell lines includes human embryonic kidney cells (HEK293, HEK293T); human connective tissue cells (HT-1080); human cervical carcinoma cells (HELA); human embryonic retinal cells (PER.C6); human kidney cells (HKB-11); human liver cells (Huh-7); human lung cells (W138); human liver cells (Hep G2); human U2-OS osteosarcoma cells, human A549 lung cells, human A-431 epidermal cells, or human K562 bone marrow cells. In other embodiments, the engineered cell lines can be derived from non-human cell lines. Suitable cell lines include, without limit, Chinese hamster ovary (CHO) cells; baby hamster kidney (BHK) cells; mouse myeloma NS0 cells; mouse myeloma Sp2/0 cell; mouse mammary gland C127 cells; mouse embryonic fibroblast 3T3 cells (NIH3T3); mouse B lymphoma A20 cells; mouse melanoma B16 cells; mouse myoblast C2C12 cells; mouse embryonic mesenchymal C3H-10T1/2 cells; mouse carcinoma CT26 cells, mouse prostate DuCuP cells; mouse breast EMT6 cells; mouse hepatoma Hepalclc7 cells; mouse myeloma J5582 cells; mouse epithelial MTD-1A cells; mouse myocardial MyEnd cells; mouse renal RenCa cells; mouse pancreatic RIN-5F cells; mouse melanoma X64 cells; mouse lymphoma YAC-1 cells; rat glioblastoma 9L cells; rat B lymphoma RBL cells; rat neuroblastoma B35 cells; rat hepatoma cells (HTC); buffalo rat liver BRL 3A cells; canine kidney cells (MDCK); canine mammary (CMT) cells; rat osteosarcoma D17 cells; rat monocyte/macrophage DH82 cells; monkey kidney SV-40 transformed fibroblast (COS7) cells; monkey kidney CVI-76 cells; or African green monkey kidney (VERO, VERO-76) cells. An extensive list of mammalian cell lines may be found in the American Type Culture Collection catalog (ATCC, Manassas, Va.). In some embodiments, the cell lines disclosed herein are other than mouse cell lines. In certain embodiments, the engineered cell lines are CHO cell lines. Suitable CHO cell lines include, but are not limited to, CHO-K1, CHO-KISV, CHO GS−/−, CHO S, DG44, DuxxB11, and derivatives thereof.

[0067] In various embodiments, the parental cell lines can be deficient in glutamine synthase (GS), dihydrofolate reductase (DHFR), hypoxanthine-guanine phosphoribosyltransferase (HPRT), or a combination thereof. For example, the chromosomal sequences encoding GS, DHFR, and/or HPRT can be inactivated. In specific embodiments, all chromosomal sequences encoding GS, DHFR, and/or HPRT are inactivated in the parental cell lines.

[0068] In some embodiments, the engineered cell lines disclosed herein can further comprise at least one nucleic acid encoding a recombinant protein. In general, the recombinant protein is heterologous, meaning that the protein is not native to the cell. The recombinant protein may be, without limit, a therapeutic protein chosen from an antibody, a fragment of an antibody, a monoclonal antibody, a humanized antibody, a humanized monoclonal antibody, a chimeric antibody, an IgG molecule, an IgG heavy chain, an IgG light chain, an IgA molecule, an IgD molecule, an IgE molecule, an IgM molecule, a vaccine, a growth factor, a cytokine, an interferon, an interleukin, a hormone, a clotting (or coagulation) factor, a blood component, an enzyme, a therapeutic protein, a nutraceutical protein, a functional fragment or functional variant of any of the forgoing, or a fusion protein comprising any of the foregoing proteins and/or functional fragments or variants thereof.

[0069] In some embodiments, the nucleic acid encoding the recombinant protein can be linked to sequence encoding hypoxanthine-guanine phosphoribosyltransferase (HPRT), dihydrofolate reductase (DHFR), and/or glutamine synthase (GS), such that HPRT, DHFR, and/or GS may be used as an amplifiable selectable marker. The nucleic acid encoding the recombinant protein also can be linked to sequence encoding at least one antibiotic resistance gene and/or sequence encoding marker proteins such as fluorescent proteins. In some embodiments, the nucleic acid encoding the recombinant protein can be part of an expression construct. The expression constructs or vectors can comprise additional expression control sequences (e.g., enhancer sequences, Kozak sequences, polyadenylation sequences, transcriptional termination sequences, etc.), selectable marker sequences, origins of replication, and the like. Additional information can be found in “Current Protocols in Molecular Biology” Ausubel et al., John Wiley & Sons, New York, 2003 or “Molecular Cloning: A Laboratory Manual” Sambrook & Russell, Cold Spring Harbor Press, Cold Spring Harbor, N.Y., 3rd edition, 2001.

[0070] In some embodiments, the nucleic acid encoding the recombinant protein can be located extrachromosomally. That is, the nucleic acid encoding the recombinant protein can be transiently expressed from a plasmid, a cosmid, an artificial chromosome, a minichromosome, or another extrachromosomal construct. In other embodiments, the nucleic acid encoding the recombinant protein can be chromosomally integrated into the genome of the cell. The integration can be random or targeted. Accordingly, the recombinant protein can be stably expressed. In some iterations of this embodiment, the nucleic acid sequence encoding the recombinant protein can be operably linked to an appropriate heterologous expression control sequence (i.e., promoter). In other iterations, the nucleic acid sequence encoding the recombinant protein can be placed under control of an endogenous expression control sequence. The nucleic acid sequence encoding the recombinant protein can be integrated into the genome of the cell line using homologous recombination, targeting endonuclease-mediated genome editing, viral vectors, transposons, plasmids, and other well-known means. Additional guidance can be found in Ausubel et al. 2003, supra and Sambrook & Russell, 2001, supra.

[0071] Yet another aspect of the present disclosure provides methods for preparing or engineering the cell lines having reduced or eliminated expression of cathepsin D. Chromosomal sequences encoding cathepsin D can be knocked-down or knocked-out using a variety of techniques. In general, the engineered cell lines are prepared using a targeting endonuclease-mediated genome modification process. Persons skilled the art understand that said engineered cell lines also can be prepared using site-specific recombination systems, random mutagenesis, or other methods known in the art.

[0072] In general, engineered cell lines are prepared by a method comprising introducing into a parental cell line of interest at least one targeting endonuclease or nucleic acid encoding said targeting endonuclease, wherein the targeting endonuclease is targeted to a chromosomal sequence encoding cathepsin D. The targeting endonuclease recognizes and binds the specific chromosomal sequence and introduces a double-stranded break. In some embodiments, the double-stranded break is repaired by a non-homologous end-joining (NHEJ) repair process. Because NHEJ is error prone, a deletion, insertion, and/or substitution of at least one nucleotide may occur, thereby disrupting the reading frame of the chromosomal sequence such that no protein product is produced. In other embodiments, the targeting endonucleases can also be used to alter a chromosomal sequence via a homologous recombination reaction by co-introducing a polynucleotide having substantial sequence identity with a portion of the targeted chromosomal sequence. In such situations, the double-stranded break introduced by the targeting endonuclease is repaired by a homology-directed repair process such that the chromosomal sequence is exchanged with the polynucleotide in a manner that results in the chromosomal sequence being changed or altered (e.g., by integration of an exogenous sequence).

[0073] A variety of targeting endonucleases can be used to modify the chromosomal sequences encoding cathepsin D. The targeting endonuclease can be a naturally-occurring protein or an engineered protein. Suitable targeting endonucleases include, without limit, zinc fmger nucleases (ZFNs), CRISPR nucleases, transcription activator-like effector (TALE) nucleases (TALENs), meganucleases, chimeric nucleases, site-specific endonucleases, and artificial targeted DNA double strand break inducing agents.

[0074] In specific embodiments, the targeting endonuclease can be a pair of zinc fmger nucleases (ZFNs). ZFNs bind to specific targeted sequences and introduce a double-stranded break into a targeted cleavage site. Typically, a ZFN comprises a DNA binding domain (i.e., zinc fmgers) and a cleavage domain (i.e., nuclease), each of which is described below.

[0075] DNA binding domain. A DNA binding domains or the zinc fingers can be engineered to recognize and bind to any nucleic acid sequence of choice. See, for example, Beerli et al. (2002) Nat. Biotechnol. 20:135-141; Pabo et al. (2001) Ann. Rev. Biochem. 70:313-340; Isalan et al. (2001) Nat. Biotechnol. 19:656-660; Segal et al. (2001) Curr. Opin. Biotechnol. 12:632-637; Choo et al. (2000) Curr. Opin. Struct. Biol. 10:411-416; Zhang et al. (2000) J. Biol. Chem. 275(43):33850-33860; Doyon et al. (2008) Nat. Biotechnol. 26:702-708; and Santiago et al. (2008) Proc. Natd. Acad. Sci. USA 105:5809-5814. An engineered zinc fmger binding domain may have a novel binding specificity compared to a naturally-occurring zinc finger protein. Engineering methods include, but are not limited to, rational design and various types of selection. Rational design includes, for example, using databases comprising doublet, triplet, and/or quadruplet nucleotide sequences and individual zinc finger amino acid sequences, in which each doublet, triplet or quadruplet nucleotide sequence is associated with one or more amino acid sequences of zinc fingers which bind the particular triplet or quadruplet sequence. See, for example, U.S. Pat. Nos. 6,453,242 and 6,534,261, the disclosures of which are incorporated by reference herein in their entireties. As an example, the algorithm of described in U.S. Pat. No. 6,453,242 can be used to design a zinc finger binding domain to target a preselected sequence. Alternative methods, such as rational design using a nondegenerate recognition code table may also be used to design a zinc finger binding domain to target a specific sequence (Sera et al. (2002) Biochemistry 41:7074-7081). Publically available web-based tools for identifying potential target sites in DNA sequences as well as designing zinc finger binding domains are known in the art. For example, tools for identifying potential target sites in DNA sequences can be found at zincfmgertools.org. Tools for designing zinc finger binding domains can be found at zifit.partners.org/ZiFiT. (See also, Mandell et al. (2006) Nuc. Acid Res. 34:W516-W523; Sander et al. (2007) Nuc. Acid Res. 35:W599-W605.)

[0076] A zinc finger binding domain can be designed to recognize and bind a DNA sequence ranging from about 3 nucleotides to about 21 nucleotides in length. In one embodiment, the zinc finger binding domain can be designed to recognize and bind a DNA sequence ranging from about 9 to about 18 nucleotides in length. In general, the zinc finger binding domains of the zinc finger nucleases used herein comprise at least three zinc finger recognition regions or zinc fingers, wherein each zinc finger binds 3 nucleotides. In one embodiment, the zinc finger binding domain comprises four zinc finger recognition regions. In another embodiment, the zinc finger binding domain comprises five zinc finger recognition regions. In still another embodiment, the zinc finger binding domain comprises six zinc finger recognition regions. A zinc finger binding domain can be designed to bind to any suitable target DNA sequence. See for example, U.S. Pat. Nos. 6,607,882; 6,534,261 and 6,453,242, the disclosures of which are incorporated by reference herein in their entireties.

[0077] Exemplary methods of selecting a zinc finger recognition region include phage display and two-hybrid systems, which are described in U.S. Pat. Nos. 5,789,538; 5,925,523; 6,007,988; 6,013,453; 6,410,248; 6,140,466; 6,200,759; and 6,242,568; as well as WO 98/37186; WO 98/53057; WO 00/27878; WO 01/88197 and GB 2,338,237, each of which is incorporated by reference herein in its entirety. In addition, enhancement of binding specificity for zinc finger binding domains has been described, for example, in WO 02/077227, the entire disclosure of which is incorporated herein by reference.

[0078] Zinc finger binding domains and methods for design and construction of fusion proteins (and polynucleotides encoding same) are known to those of skill in the art and are described in detail in, for example, U.S. Pat. No. 7,888,121, which is incorporated by reference herein in its entirety. Zinc fmger recognition regions and/or multi-fingered zinc fmger proteins can be linked together using suitable linker sequences, including for example, linkers of five or more amino acids in length. See, U.S. Pat. Nos. 6,479,626; 6,903,185; and 7,153,949, the disclosures of which are incorporated by reference herein in their entireties, for non-limiting examples of linker sequences of six or more amino acids in length. The zinc finger binding domain described herein may include a combination of suitable linkers between the individual zinc fmgers of the protein.

[0079] Cleavage domain. A zinc fmger nuclease also includes a cleavage domain. The cleavage domain portion of the zinc finger nuclease can be obtained from any endonuclease or exonuclease. Non-limiting examples of endonucleases from which a cleavage domain can be derived include, but are not limited to, restriction endonucleases and homing endonucleases. See, for example, New England Biolabs Catalog or Belfort et al. (1997) Nucleic Acids Res. 25:3379-3388. Additional enzymes that cleave DNA are known (e.g., Si Nuclease; mung bean nuclease; pancreatic DNase I; micrococcal nuclease; yeast HO endonuclease). See also Linn et al. (eds.) Nucleases, Cold Spring Harbor Laboratory Press, 1993. One or more of these enzymes (or functional fragments thereof) can be used as a source of cleavage domains.

[0080] A cleavage domain also can be derived from an enzyme or portion thereof, as described above, that requires dimerization for cleavage activity. Two zinc finger nucleases can be required for cleavage, as each nuclease comprises a monomer of the active enzyme dimer. Alternatively, a single zinc finger nuclease can comprise both monomers to create an active enzyme dimer. As used herein, an “active enzyme dimer” is an enzyme dimer capable of cleaving a nucleic acid molecule. The two cleavage monomers can be derived from the same endonuclease (or functional fragments thereof), or each monomer can be derived from a different endonuclease (or functional fragments thereof).

[0081] When two cleavage monomers are used to form an active enzyme dimer, the recognition sites for the two zinc fingers are preferably disposed such that binding of the two zinc fingers to their respective recognition sites places the cleavage monomers in a spatial orientation to each other that allows the cleavage monomers to form an active enzyme dimer, e.g., by dimerizing. As a result, the near edges of the recognition sites can be separated by about 5 to about 18 nucleotides. For instance, the near edges can be separated by about 5, 6, 7, 8, 9, 10, 11, 12, 13, 14, 15, 16, 17 or 18 nucleotides. It will however be understood that any integral number of nucleotides or nucleotide pairs can intervene between two recognition sites (e.g., from about 2 to about 50 nucleotide pairs or more). The near edges of the recognition sites of the zinc finger nucleases, such as for example those described in detail herein, can be separated by 6 nucleotides. In general, the site of cleavage lies between the recognition sites.

[0082] Restriction endonucleases (restriction enzymes) are present in many species and are capable of sequence-specific binding to DNA (at a recognition site), and cleaving DNA at or near the site of binding. Certain restriction enzymes (e.g., Type IIS) cleave DNA at sites removed from the recognition site and have separable binding and cleavage domains. For example, the Type IIS enzyme FokI catalyzes double-stranded cleavage of DNA, at 9 nucleotides from its recognition site on one strand and 13 nucleotides from its recognition site on the other. See, for example, U.S. Pat. Nos. 5,356,802; 5,436,150 and 5,487,994; as well as Li et al. (1992) Proc. Natl. Acad. Sci. USA 89:4275-4279; Li et al. (1993) Proc. Natl. Acad. Sci. USA 90:2764-2768; Kim et al. (1994a) Proc. Natl. Acad. Sci. USA 91:883-887; Kim et al. (1994b) J. Biol. Chem. 269:31978-31982. Thus, a zinc finger nuclease can comprise the cleavage domain from at least one Type IIS restriction enzyme and one or more zinc finger binding domains, which may or may not be engineered. Exemplary Type IIS restriction enzymes are described for example in International Publication WO 07/014,275, the disclosure of which is incorporated by reference herein in its entirety. Additional restriction enzymes also contain separable binding and cleavage domains, and these also are contemplated by the present disclosure. See, for example, Roberts et al. (2003) Nucleic Acids Res. 31:418-420.

[0083] An exemplary Type IIS restriction enzyme, whose cleavage domain is separable from the binding domain, is FokI. This particular enzyme is active as a dimer (Bitinaite et al. (1998) Proc. Natl. Acad. Sci. USA 95: 10, 570-10, 575). Accordingly, for the purposes of the present disclosure, the portion of the FokI enzyme used in a zinc finger nuclease is considered a cleavage monomer. Thus, for targeted double-stranded cleavage using a FokI cleavage domain, two zinc finger nucleases, each comprising a FokI cleavage monomer, can be used to reconstitute an active enzyme dimer. Alternatively, a single polypeptide molecule containing a zinc finger binding domain and two FokI cleavage monomers can also be used.

[0084] In certain embodiments, the cleavage domain comprises one or more engineered cleavage monomers that minimize or prevent homodimerization. By way of non-limiting example, amino acid residues at positions 446, 447, 479, 483, 484, 486, 487, 490, 491, 496, 498, 499, 500, 531, 534, 537, and 538 of FokI are all targets for influencing dimerization of the FokI cleavage half-domains. Exemplary engineered cleavage monomers of FokI that form obligate heterodimers include a pair in which a first cleavage monomer includes mutations at amino acid residue positions 490 and 538 of FokI and a second cleavage monomer that includes mutations at amino-acid residue positions 486 and 499.

[0085] Thus, in one embodiment of the engineered cleavage monomers, a mutation at amino acid position 490 replaces Glu (E) with Lys (K); a mutation at amino acid residue 538 replaces Iso (I) with Lys (K); a mutation at amino acid residue 486 replaces Gin (Q) with Glu (E); and a mutation at position 499 replaces Iso (I) with Lys (K). Specifically, the engineered cleavage monomers can be prepared by mutating positions 490 from E to K and 538 from I to K in one cleavage monomer to produce an engineered cleavage monomer designated “E490K:I538K” and by mutating positions 486 from Q to E and 499 from I to K in another cleavage monomer to produce an engineered cleavage monomer designated “Q486E:I499K.” The above described engineered cleavage monomers are obligate heterodimer mutants in which aberrant cleavage is minimized or abolished. Engineered cleavage monomers can be prepared using a suitable method, for example, by site-directed mutagenesis of wild-type cleavage monomers (FokI) as described in U.S. Pat. No. 7,888,121, which is incorporated herein in its entirety.

[0086] Additional domains. In some embodiments, the zinc finger nuclease further comprises at least one nuclear localization sequence (NLS). A NLS is an amino acid sequence which facilitates targeting the zinc fmger nuclease protein into the nucleus to introduce a double stranded break at the target sequence in the chromosome. Nuclear localization signals are known in the art (see, e.g., Lange et al., J. Biol. Chem., 2007, 282:5101-5105). Non-limiting examples of nuclear localization signals include PKKKRKV (SEQ ID NO:3312), PKKKRRV (SEQ ID NO:3313), KRPAATKKAGQAKKKK (SEQ ID NO:3314), YGRKKRRQRRR (SEQ ID NO:3315), RKKRRQRRR (SEQ ID NO:3316), PAAKRVKLD (SEQ ID NO:3317), RQRRNELKRSP (SEQ ID NO:3318), VSRKRPRP (SEQ ID NO:3319), PPKKARED (SEQ ID NO:3320), PQPKKKPL (SEQ ID NO:3321), SALIKKKKKMAP (SEQ ID NO:3322), PKQKKRK (SEQ ID NO:3323), RKLKKKIKKL (SEQ ID NO:3324), REKKKFLKRR (SEQ ID NO:3325), KRKGDEVDGVDEVAKKKSKK (SEQ ID NO:3326), RKCLQAGMNLEARKTKK (SEQ ID NO:3327), NQSSNFGPMKGGNFGGRSSGPYGGGGQYFAKPRNQGGY (SEQ ID NO:3328), and RMRIZFKNKGKDTAELRRRRVEVSVELRKAKKDEQILKRRNV (SEQ ID NO:3329). The NLS can be located at the N-terminus, the C-terminus, or in an internal location of the zinc finger nuclease.

[0087] In additional embodiments, the zinc finger nuclease can also comprise at least one cell-penetrating domain. Examples of suitable cell-penetrating domains include, without limit, GRKKRRQRRRPPQPKKKRKV (SEQ ID NO:3330), PLSSIFSRIGDPPKKKRKV (SEQ ID NO:3331), GALFLGWLGAAGSTMGAPKKKRKV (SEQ ID NO:3332), GALFLGFLGAAGSTMGAWSQPKKKRKV (SEQ ID NO:3333), KETWWETWWTEWSQPKKKRKV (SEQ ID NO:3334), YARAAARQARA (SEQ ID NO:3335), THRLPRRRRRR (SEQ ID NO:3336), GGRRARRRRRR (SEQ ID NO:3337), RRQRRTSKLMKR (SEQ ID NO:3338), GWTLNSAGYLLGKINLKALAALAKKIL (SEQ ID NO:3339), KALAWEAKLAKALAKALAKHLAKALAKALKCEA (SEQ ID NO:3340), and RQIKIWFQNRRMKWKK (SEQ ID NO:3341). The cell-penetrating domain can be located at the N-terminus, the C-terminus, or in an internal location of the zinc fmger nuclease.

[0088] In still other embodiments, the zinc finger nuclease can further comprise at least one marker domain. Non-limiting examples of marker domains include fluorescent proteins, purification tags, and epitope tags. In one embodiment, the marker domain can be a fluorescent protein. Non limiting examples of suitable fluorescent proteins include green fluorescent proteins (e.g., GFP, GFP-2, tagGFP, turboGFP, EGFP, Emerald, Azami Green, Monomeric Azami Green, CopGFP, AceGFP, ZsGreen1), yellow fluorescent proteins (e.g. YFP, EYFP, Citrine, Venus, YPet, PhiYFP, ZsYellow1), blue fluorescent proteins (e.g. EBFP, EBFP2, Azurite, mKalamal, GFPuv, Sapphire, T-sapphire), cyan fluorescent proteins (e.g. ECFP, Cerulean, CyPet, AmCyan1, Midoriishi-Cyan), red fluorescent proteins (mKate, mKate2, mPlum, DsRed monomer, mCherry, mRFP1, DsRed-Express, DsRed2, DsRed-Monomer, HcRed-Tandem, HcRedl, AsRed2, eqFP611, mRasberry, mStrawberry, Jred), and orange fluorescent proteins (mOrange, mKO, Kusabira-Orange, Monomeric Kusabira-Orange, mTangerine, tdTomato) or any other suitable fluorescent protein. In another embodiment, the marker domain can be a purification tag and/or an epitope tag. Suitable tags include, but are not limited to, poly(His) tag, FLAG (or DDK) tag, Halo tag, AcV5 tag, AU1 tag, AU5 tag, biotin carboxyl carrier protein (BCCP), calmodulin binding protein (CBP), chitin binding domain (CBD), E tag, E2 tag, ECS tag, eXact tag, Glu-Glu tag, glutathione-S-transferase (GST), HA tag, HSV tag, KT3 tag, maltose binding protein (MBP), MAP tag, Myc tag, NE tag, NusA tag, PDZ tag, S tag, Si tag, SBP tag, Softag 1 tag, Softag 3 tag, Spot tag, Strep tag, SUMO tag, T7 tag, tandem affinity purification (TAP) tag, thioredoxin (TRX), V5 tag, VSV-G tag, and Xa tag. The marker domain can be located at the N-terminus, the C-terminus, or in an internal location of the zinc finger nuclease.

[0089] The at least one nuclear localization signal, at least one cell-penetrating domain, and/or at least one marker domain can be linked directly to the zinc finger nuclease via one or more chemical bonds (e.g., covalent bonds). Alternatively, the at least one nuclear localization signal, at least one cell-penetrating domain, and/or at least one marker domain, can be linked indirectly to the zinc finger nuclease via one or more linkers. Suitable linkers include amino acids, peptides, nucleotides, nucleic acids, organic linker molecules (e.g., maleimide derivatives, N-ethoxybenzylimidazole, biphenyl-3,4′,5-tricarboxylic acid, p-aminobenzyloxycarbonyl, and the like), disulfide linkers, and polymer linkers (e.g., PEG). The linker can include one or more spacing groups including, but not limited to alkylene, alkenylene, alkynylene, alkyl, alkenyl, alkynyl, alkoxy, aryl, heteroaryl, aralkyl, aralkenyl, aralkynyl and the like. The linker can be neutral, or carry a positive or negative charge. Additionally, the linker can be cleavable such that the linker's covalent bond that connects the linker to another chemical group can be broken or cleaved under certain conditions, including pH, temperature, salt concentration, light, a catalyst, or an enzyme. In some embodiments, the linker can be a peptide linker. The peptide linker can be a flexible amino acid linker or a rigid amino acid linker. Additional examples of suitable linkers are well known in the art and programs to design linkers are readily available (Crasto et al., Protein Eng., 2000, 13(5):309-312).

[0090] In other embodiments, the targeting endonuclease can be a Clustered Regularly Interspersed Short Palindromic Repeat (CRISPR) nuclease. CRISPR nucleases are RNA-guided nucleases derived from bacterial or archaeal CRISPR/CRISPR-associated (Cas) systems. A CRISPR RNP system comprises a CRISPR nuclease and a guide RNA.

[0091] Nuclease. The CRISPR nuclease can be derived from a type I (i.e., IA, IB, IC, ID, IE, or IF), type II (i.e., IIA, IIB, or IIC), type III (i.e., IIIA or IIIB), type V, or type VI CRISPR system, which are present in various bacteria and archaea. For example, the CRISPR nuclease can be from Streptococcus sp. (e.g., S. pyogenes, S. thermophilus, S. pasteurianus), Campylobacter sp. (e.g., Campylobacterjejuni), Francisella sp. (e.g., Francisella novicida), Acaryochloris sp., Acetohalobium sp., Acidaminococcus sp., Acidithiobacillus sp., Alicyclobacillus sp., Allochromatium sp., Ammonifex sp., Anabaena sp., Arthrospira sp., Bacillus sp., Burkholderiales sp., Caldicelulosiruptor sp., Candidatus sp., Clostridium sp., Crocosphaera sp., Cyanothece sp., Exiguobacterium sp., Finegoldia sp., Ktedonobacter sp., Lachnospiraceae sp., Lactobacillus sp., Lyngbya sp., Marinobacter sp., Methanohalobium sp., Microscilla sp., Microcoleus sp., Microcystis sp., Natranaerobius sp., Neisseria sp., Nitrosococcus sp., Nocardiopsis sp., Nodularia sp., Nostoc sp., Oscillatoria sp., Polaromonas sp., Pelotomaculum sp., Pseudoalteromonas sp., Petrotoga sp., Prevotella sp., Staphylococcus sp., Streptomyces sp., Streptosporangium sp., Synechococcus sp., Thermosipho sp., or Verrucomicrobia sp. In other embodiments, the CRISPR nuclease can be derived from an archaeal CRISPR system, a CRISPR/CasX system, or a CRISPR/CasY system (Burstein et al., Nature, 2017, 542(7640):237-241).

[0092] In some embodiments, the CRISPR nuclease can be derived from a type II CRISPR nuclease. For example, the type II CRISPR nuclease can be a Cas9 protein. Suitable Cas9 nucleases include Streptococcus pyogenes Cas9 (SpCas9), Francisella novicida Cas9 (FnCas9), Staphylococcus aureus (SaCas9), Streptococcus thermophilus Cas9 (StCas9), Streptococcus pasteurianus (SpaCas9), Campylobacter jejuni Cas9 (CjCas9), Neisseria meningitis Cas9 (NmCas9), or Neisseria cinerea Cas9 (NcCas9). In other embodiments, the CRISPR nuclease can be derived from a type V CRISPR nuclease, such as a Cpf1 nuclease. Suitable Cpf1 nucleases include Francisella novicida Cpf1 (FnCpf1), Acidaminococcus sp. Cpf1 (AsCpf1), or Lachnospiraceae bacterium ND2006 Cpf1 (LbCpf1). In yet another embodiment, the CRISPR nuclease can be derived from a type VI CRISPR nuclease, e.g., Leptotrichia wadei Cas13a (LwaCas13a) or Leptotrichia shahii Cas13a (LshCas13a).

[0093] The CRISPR nuclease can be a wild type CRISPR nuclease, a modified CRISPR nuclease, or a fragment of a wild type or modified CRISPR nuclease. The CRISPR nuclease can be modified to increase nucleic acid binding affinity and/or specificity, alter enzymatic activity, and/or change another property of the protein. For example, nuclease (i.e., DNase, RNase) domains of the CRISPR nuclease can be modified, deleted, or inactivated. The CRISPR nuclease can be truncated to remove domains that are not essential for the function of the nuclease.

[0094] CRISPR nucleases comprise two nuclease domains. For example, a Cas9 nuclease comprises a HNH domain, which cleaves the guide RNA complementary strand, and a RuvC domain, which cleaves the non-complementary strand; a Cpf1 nuclease comprises a RuvC domain and a NUC domain; and a Cas13a nuclease comprises two HNEPN domains. When both nuclease domains are functional, CRISPR nuclease introduces a double-stranded break. Either nuclease domain can be inactivated by one or more mutations and/or deletions, thereby creating a variant that introduces a single-strand break in one strand of the double-stranded sequence. For example, one or more mutations in the RuvC domain of Cas9 nuclease (e.g., D10A, D8A, E762A, and/or D986A) results in an HNH nickase that nicks the guide RNA complementary strand; and one or more mutations in the HNH domain of Cas9 nuclease (e.g., H840A, H559A, N854A, N856A, and/or N863A) results in a RuvC nickase that nicks the guide RNA non-complementary strand. Comparable mutations can convert Cpf1 and Cas13a nucleases to nickases. Two CRISPR nickases targeted to opposites strands of a chromosomal sequence (via a pair of offset guide RNAs) can be used in combination to create a double-stranded break in the chromosomal sequence. Dual CRISPR nickase RNPs can increase target specificity and reduce off target effects.

[0095] Additional domains. The CRISPR nuclease can further comprise at least one nuclear localization sequence (NLS). A NLS is an amino acid sequence which facilitates targeting the zinc finger nuclease protein into the nucleus to introduce a double stranded break at the target sequence in the chromosome. Nuclear localization signals are known in the art (see, e.g., Lange et al., J. Biol. Chem., 2007, 282:5101-5105). Non-limiting examples of nuclear localization signals include PKKKRKV (SEQ ID NO:3312), PKKKRRV (SEQ ID NO:3313), KRPAATKKAGQAKKKK (SEQ ID NO:3314), YGRKKRRQRRR (SEQ ID NO:3315), RKKRRQRRR (SEQ ID NO:3316), PAAKRVKLD (SEQ ID NO:3317), RQRRNELKRSP (SEQ ID NO:3318), VSRKRPRP (SEQ ID NO:3319), PPKKARED (SEQ ID NO:3320), PQPKKKPL (SEQ ID NO:3321), SALIKKKKKMAP (SEQ ID NO:3322), PKQKKRK (SEQ ID NO:3323), RKLKKKIKKL (SEQ ID NO:3324), REKKKFLKRR (SEQ ID NO:3325), KRKGDEVDGVDEVAKKKSKK (SEQ ID NO:3326), RKCLQAGMNLEARKTKK (SEQ ID NO:3327), NQSSNFGPMKGGNFGGRSSGPYGGGGQYFAKPRNQGGY (SEQ ID NO:3328), and RMRIZFKNKGKDTAELRRRRVEVSVELRKAKKDEQILKRRNV (SEQ ID NO:3329). The NLS can be located at the N-terminus, the C-terminus, or in an internal location of the CRISPR nuclease.

[0096] In additional embodiments, the CRISPR nuclease can also comprise at least one cell-penetrating domain. Examples of suitable cell-penetrating domains include, without limit, GRKKRRQRRRPPQPKKKRKV (SEQ ID NO:3330), PLSSIFSRIGDPPKKKRKV (SEQ ID NO:3331), GALFLGWLGAAGSTMGAPKKKRKV (SEQ ID NO:3332), GALFLGFLGAAGSTMGAWSQPKKKRKV (SEQ ID NO:3333), KETWWETWWTEWSQPKKKRKV (SEQ ID NO:3334), YARAAARQARA (SEQ ID NO:3335), THRLPRRRRRR (SEQ ID NO:3336), GGRRARRRRRR (SEQ ID NO:3337), RRQRRTSKLMKR (SEQ ID NO:3338), GWTLNSAGYLLGKINLKALAALAKKIL (SEQ ID NO:3339), KALAWEAKLAKALAKALAKHLAKALAKALKCEA (SEQ ID NO:3340), and RQIKIWFQNRRMKWKK (SEQ ID NO:3341). The cell-penetrating domain can be located at the N-terminus, the C-terminus, or in an internal location of the CRISPR protein.

[0097] In still other embodiments, the CRISPR nuclease can further comprise at least one marker domain. Non-limiting examples of marker domains include fluorescent proteins, purification tags, and epitope tags. In one embodiment, the marker domain can be a fluorescent protein. Non limiting examples of suitable fluorescent proteins include green fluorescent proteins (e.g., GFP, GFP-2, tagGFP, turboGFP, EGFP, Emerald, Azami Green, Monomeric Azami Green, CopGFP, AceGFP, ZsGreen1), yellow fluorescent proteins (e.g. YFP, EYFP, Citrine, Venus, YPet, PhiYFP, ZsYellow1), blue fluorescent proteins (e.g. EBFP, EBFP2, Azurite, mKalamal, GFPuv, Sapphire, T-sapphire), cyan fluorescent proteins (e.g. ECFP, Cerulean, CyPet, AmCyan1, Midoriishi-Cyan), red fluorescent proteins (mKate, mKate2, mPlum, DsRed monomer, mCherry, mRFP1, DsRed-Express, DsRed2, DsRed-Monomer, HcRed-Tandem, HcRedl, AsRed2, eqFP611, mRasberry, mStrawberry, Jred), and orange fluorescent proteins (mOrange, mKO, Kusabira-Orange, Monomeric Kusabira-Orange, mTangerine, tdTomato) or any other suitable fluorescent protein. In another embodiment, the marker domain can be a purification tag and/or an epitope tag. Suitable tags include, but are not limited to, poly(His) tag, FLAG (or DDK) tag, Halo tag, AcV5 tag, AU1 tag, AU5 tag, biotin carboxyl carrier protein (BCCP), calmodulin binding protein (CBP), chitin binding domain (CBD), E tag, E2 tag, ECS tag, eXact tag, Glu-Glu tag, glutathione-S-transferase (GST), HA tag, HSV tag, KT3 tag, maltose binding protein (MBP), MAP tag, Myc tag, NE tag, NusA tag, PDZ tag, S tag, Si tag, SBP tag, Softag 1 tag, Softag 3 tag, Spot tag, Strep tag, SUMO tag, T7 tag, tandem affinity purification (TAP) tag, thioredoxin (TRX), V5 tag, VSV-G tag, and Xa tag. The marker domain can be located at the N-terminus, the C-terminus, or in an internal location of the CRISPR nuclease.

[0098] The at least one nuclear localization signal, at least one cell-penetrating domain, and/or at least one marker domain can be linked directly to the CRISPR nuclease via one or more chemical bonds (e.g., covalent bonds). Alternatively, the at least one nuclear localization signal, at least one cell-penetrating domain, and/or at least one marker domain, can be linked indirectly to the CRISPR nuclease via one or more linkers. Suitable linkers include amino acids, peptides, nucleotides, nucleic acids, organic linker molecules (e.g., maleimide derivatives, N-ethoxybenzylimidazole, biphenyl-3,4′,5-tricarboxylic acid, p-am inobenzyloxycarbonyl, and the like), disulfide linkers, and polymer linkers (e.g., PEG). The linker can include one or more spacing groups including, but not limited to alkylene, alkenylene, alkynylene, alkyl, alkenyl, alkynyl, alkoxy, aryl, heteroaryl, aralkyl, aralkenyl, aralkynyl and the like. The linker can be neutral, or carry a positive or negative charge. Additionally, the linker can be cleavable such that the linker's covalent bond that connects the linker to another chemical group can be broken or cleaved under certain conditions, including pH, temperature, salt concentration, light, a catalyst, or an enzyme. In some embodiments, the linker can be a peptide linker. The peptide linker can be a flexible amino acid linker or a rigid amino acid linker. Additional examples of suitable linkers are well known in the art and programs to design linkers are readily in the art.

[0099] Guide RNA. A CRISPR nuclease is guided to its target site by a guide RNA. The guide RNA hybridizes with the target site and interacts with the CRISPR nuclease to direct the CRISPR nuclease to the target site in the chromosomal sequence. The target site has no sequence limitation except that the sequence is bordered by a protospacer adjacent motif (PAM). CRISPR proteins from different bacterial species recognize different PAM sequences. For example, PAM sequences include 5′-NGG (SpCas9, FnCAs9), 5′-NGRRT (SaCas9), 5′-NNAGAAW (StCas9), 5′-NNNNGATT (NmCas9), 5-NNNNRYAC (CjCas9), and 5′-TTTV (Cpf1), wherein N is defined as any nucleotide, R is defined as either G or A, W is defined as either A or T, Y is defined an either C or T, and V is defined as A, C, or G. Cas9 PAMs are located 3′ of the target site, and cpfl PAMs are located 5′ of the target site.

[0100] A guide RNA comprises three regions: a first region at the 5′ end that is complementary to sequence at the target site, a second internal region that forms a stem loop structure, and a third 3′ region that remains essentially single-stranded. The first region of each guide RNA is different such that each guide RNA guides a CRISPR nuclease to a specific target site. The second and third regions (also called the scaffold region) of each guide RNA can be the same in all guide RNAs.

[0101] The first region of the guide RNA is complementary to sequence protospacer sequence) at the target site such that the first region of the guide RNA can base pair with sequence at the target site. The complementarity between the first region (i.e., crRNA) of the guide RNA and the target sequence can be at least 80%, at least 85%, at least 90%, at least 95%, or more. In general, there are no mismatches between the sequence of the first region of the guide RNA and the sequence at the target site (i.e., the complementarity is total). In various embodiments, the first region of the guide RNA can comprise from about 10 nucleotides to more than about 25 nucleotides. For example, the region of base pairing between the first region of the guide RNA and the target site in the chromosomal sequence can be about 10, 11, 12, 13, 14, 15, 16, 17, 18, 19, 20, 22, 23, 24, 25, or more than 25 nucleotides in length. In exemplary embodiments, the first region of the guide RNA is about 19, 20, or 21 nucleotides in length.

[0102] The guide RNA also comprises a second region that forms a secondary structure. In some embodiments, the secondary structure comprises a stem (or hairpin) and a loop. The length of the loop and the stem can vary. For example, the loop can range from about 3 to about 10 nucleotides in length, and the stem can range from about 6 to about 20 base pairs in length. The stem can comprise one or more bulges of 1 to about 10 nucleotides. Thus, the overall length of the second region can range from about 16 to about 60 nucleotides in length. In an exemplary embodiment, the loop is about 4 nucleotides in length and the stem comprises about 12 base pairs.

[0103] The guide RNA also comprises a third region at the 3′ end that remains essentially single-stranded. Thus, the third region has no complementarity to any chromosomal sequence in the cell of interest and has no complementarity to the rest of the guide RNA. The length of the third region can vary. In general, the third region is more than about 4 nucleotides in length. For example, the length of the third region can range from about 5 to about 60 nucleotides in length.

[0104] The combined length of the second and third regions (or scaffold) of the guide RNA can range from about 30 to about 120 nucleotides in length. In one aspect, the combined length of the second and third regions of the guide RNA range from about 70 to about 100 nucleotides in length.

[0105] In some embodiments, the guide RNA comprises one molecule comprising all three regions. In other embodiments, the guide RNA can comprise two separate molecules. The first RNA molecule can comprise the first (5′) region of the guide RNA and one half of the “stem” of the second region of the guide RNA. The second RNA molecule can comprise the other half of the “stem” of the second region of the guide RNA and the third region of the guide RNA. Thus, in this embodiment, the first and second RNA molecules each contain a sequence of nucleotides that are complementary to one another. For example, in one embodiment, the first and second RNA molecules each comprise a sequence (of about 6 to about 20 nucleotides) that base pairs to the other sequence to form a functional guide RNA. In certain embodiments the guide RNA is UAGACGUGAACUUGCGCAGG (SEQ ID NO: 3342) or GCAAGUUCACGUCUAUCCGU (SEQ ID NO: 3343).

[0106] In further embodiments, the targeting endonuclease can be a meganuclease. Meganucleases are endodeoxyribonucleases characterized by long recognition sequences, i.e., the recognition sequence generally ranges from about 12 base pairs to about 40 base pairs. As a consequence of this requirement, the recognition sequence generally occurs only once in any given genome. Among meganucleases, the family of homing endonucleases named LAGLIDADG has become a valuable tool for the study of genomes and genome engineering (see, e.g., Arnould et al., 2011, Protein Eng Des Sel, 24(1-2):27-31). Other suitable meganucleases include I-Crel and I-Dmol. A meganuclease can be targeted to a specific chromosomal sequence by modifying its recognition sequence using techniques well known to those skilled in the art.

[0107] In additional embodiments, the targeting endonuclease can be a transcription activator-like effector (TALE) nuclease. TALEs are transcription factors from the plant pathogen Xanthomonas that can be readily engineered to bind new DNA targets. TALEs or truncated versions thereof may be linked to the catalytic domain of endonucleases such as FokI to create targeting endonuclease called TALE nucleases or TALENs (Sanjana et al., 2012, Nat Protoc, 7(1):171-192) and Arnould et al., 2011, Protein Engineering, Design & Selection, 24(1-2):27-31).

[0108] In alternate embodiments, the targeting endonuclease can be chimeric nuclease. Non-limiting examples of chimeric nucleases include ZF-meganucleases, TAL-meganucleases, Cas9-FokI fusions, ZF-Cas9 fusions, TAL-Cas9 fusions, and the like. Persons skilled in the art are familiar with means for generating such chimeric nuclease fusions.

[0109] In still other embodiments, the targeting endonuclease can be a site-specific endonuclease. In particular, the site-specific endonuclease can be a “rare-cutter” endonuclease whose recognition sequence occurs rarely in a genome. Alternatively, the site-specific endonuclease can be engineered to cleave a site of interest (Friedhoff et al., 2007, Methods Mol Biol 352:1110123). Generally, the recognition sequence of the site-specific endonuclease occurs only once in a genome. In alternate further embodiments, the targeting endonuclease can be an artificial targeted DNA double strand break inducing agent.

[0110] The method comprises introducing the targeting endonuclease into the parental cell line of interest. The targeting endonuclease can be introduced into the cells as a purified isolated protein or as a nucleic acid encoding the targeting endonuclease. The nucleic acid can be DNA or RNA. In embodiments in which the encoding nucleic acid is mRNA, the mRNA may be 5′ capped and/or 3′ polyadenylated. In embodiments in which the encoding nucleic acid is DNA, the DNA can be linear or circular. The nucleic acid can be part of a plasmid or viral vector, wherein the encoding DNA can be operably linked to a suitable promoter. Those skilled in the art are familiar with appropriate vectors, promoters, other control elements, and means of introducing the vector into the cell of interest. In embodiments in which targeting endonuclease is a CRISPR nuclease, the CRISPR nuclease system can be introduced into the cell as a gRNA-protein complex.

[0111] The targeting endonuclease molecule(s) can be introduced into the cell by a variety of means. Suitable delivery means include microinjection, electroporation, sonoporation, biolistics, calcium phosphate-mediated transfection, cationic transfection, liposome transfection, dendrimer transfection, heat shock transfection, nucleofection transfection, magnetofection, lipofection, impalefection, optical transfection, proprietary agent-enhanced uptake of nucleic acids, and delivery via liposomes, immunoliposomes, virosomes, or artificial virions. In a specific embodiment, the targeting endonuclease molecule(s) are introduced into the cell by nucleofection.

[0112] Optional Donor Polynucleotide. The method for targeted genome modification or engineering can further comprise introducing into the cell at least one donor polynucleotide comprising sequence having at least one nucleotide change relative to the target chromosomal sequence. The donor polynucleotide has substantial sequence identity to sequence at or near the targeted site in the chromosomal sequence such that the double-stranded break introduced by the targeting endonuclease can be repaired by a homology-directed repair process and the sequence of the donor polynucleotide can be inserted into or exchanged with the chromosomal sequence, thereby modifying the chromosomal sequence. For example, the donor polynucleotide can comprise a first sequence having substantial sequence identity to sequence on one side of the target site and a second sequence having substantial sequence identity to sequence on the other side of the target site. The donor polynucleotide can further comprise a donor sequence for integration into the targeted chromosomal sequence. For example, the donor sequence can be an exogenous sequence (e.g., a marker sequence) such that integration of the exogenous sequence disrupts the reading frame and inactivates the targeted chromosomal sequence.

[0113] The lengths of the first and second sequences in the donor polynucleotide that have substantial sequence identity to sequences at or near the target site in the chromosomal sequence can and will vary. In general, each of the first and second sequences in the donor polynucleotide is at least about 10 nucleotides in length. In various embodiments, the donor polynucleotide sequences having substantial sequence identity with chromosomal sequences can be about 15 nucleotides, about 20 nucleotides, about 25 nucleotides, about 30 nucleotides, about 40 nucleotides, about 50 nucleotides, about 100 nucleotides, or more than 100 nucleotides in length.

[0114] The phrase “substantial sequence identity” means that the sequences in the polynucleotide have at least about 75% sequence identity with the chromosomal sequences of interest. In some embodiments, the sequences in the polynucleotide about 75%, 76% b, 77%, 78%, 79%, 80%, 81%, 82%, 83%, 84%, 85%, 86%, 87%, 88%, 89%, 90%, 91%, 92%, 93%, 94%, 95%, 96%, 97%, 98%, or 99% sequence identity with the chromosomal sequences of interest.

[0115] The length of the donor polynucleotide can and will vary. For example, the donor polynucleotide can range from about 20 nucleotides in length up to about 200,000 nucleotides in length. In various embodiments, the donor polynucleotide can range from about 20 nucleotides to about 100 nucleotides in length, from about 100 nucleotides to about 1000 nucleotides in length, from about 1000 nucleotides to about 10,000 nucleotides in length, from about 10,000 nucleotides to about 100,000 nucleotides in length, or from about 100,000 nucleotides to about 200,000 nucleotides in length.

[0116] Typically, the donor polynucleotide is DNA. The DNA can be single-stranded or double-stranded. The DNA can be linear or circular. In some embodiments, the donor polynucleotide can be an single-stranded, linear oligonucleotide comprising less than about 200 nucleotides. In other embodiments, the donor polynucleotide can be part of a vector. Suitable vectors include DNA plasm ids, viral vectors, bacterial artificial chromosomes (BAC), and yeast artificial chromosomes (YAC). In still other embodiments, the donor polynucleotide can be a PCR fragment or a nucleic acid complexed with a delivery vehicle such as a liposome or poloxamer.

[0117] The donor polynucleotide(s) can be introduced into the cells at the same time as the targeting endonuclease molecule(s). Alternatively, the donor polynucleotide(s) and the targeting endonuclease molecule(s) can be introduced into the cells sequentially. The ratio of the targeting endonuclease molecule(s) to the donor polynucleotide(s) can and will vary. In general, the ratio of targeting endonuclease molecule(s) to donor polynucleotide(s) ranges from about 1:10 to about 10:1. In various embodiments, the ratio of the targeting endonuclease molecule(s) to polynucleotide(s) can be about 1:10, 1:9, 1:8, 1:7, 1:6, 1:5, 1:4, 1:3, 1:2, 1:1, 2:1, 3:1, 4:1, 5:1, 6:1, 7:1, 8:1, 9:1, or 10:1. In one embodiment, the ratio is about 1:1.

[0118] The method further comprises maintaining the cell under appropriate conditions such that the double-stranded break introduced by the targeting endonuclease can be repaired by (i) a non-homologous end-joining repair process such that the chromosomal sequence is modified by a deletion, insertion and/or substitution of at least one nucleotide or, optionally, (ii) a homology-directed repair process such that the chromosomal sequence is exchanged with the sequence of the polynucleotide such that the chromosomal sequence is modified. In embodiments in which nucleic acid(s) encoding the targeting endonuclease(s) is introduced into the cell, the method comprises maintaining the cell under appropriate conditions such that the cell expresses the targeting endonuclease(s).

[0119] In general, the cell is maintained under conditions appropriate for cell growth and/or maintenance. Suitable cell culture conditions are well known in the art and are described, for example, in Santiago et al. (2008) PNAS 105:5809-5814; Moehle et al. (2007) PNAS 104:3055-3060; Urnov et al. (2005) Nature 435:646-651; and Lombardo et al (2007) Nat. Biotechnology 25:1298-1306. Those of skill in the art appreciate that methods for culturing cells are known in the art and can and will vary depending on the cell type. Routine optimization may be used, in all cases, to determine the best techniques for a particular cell type.

[0120] During this step of the process, the targeting endonuclease(s) recognizes, binds, and creates a double-stranded break(s) at the targeted cleavage site(s) in the chromosomal sequence, and during repair of the double-stranded break(s) a deletion, insertion, and/or substitution of at least one nucleotide is introduced into the targeted chromosomal sequence. In specific embodiments, the targeted chromosomal sequence is inactivated.

[0121] Upon confirmation that the chromosomal sequence of interest has been modified, single cell clones can be isolated and genotyped (via DNA sequencing and/or protein analyses). Cells comprising one modified chromosomal sequence can undergo one or more additional rounds of targeted genome modification to modify additional chromosomal sequences, thereby creating double knock-out, triple knock-outs, and the like.

[0122] Another aspect of the present disclosure encompasses methods for producing recombinant proteins with reduced levels of residual cathepsin D or reducing the level of cathepsin D contamination in recombinant proteins produced in a biologic production system. Suitable recombinant proteins are described in section (IXc). The methods comprise expressing the recombinant protein of interest in any of the engineered cell lines described above in section (I) and purifying the expressed recombinant protein. Means for producing or manufacturing recombinant proteins are well known in the field (see, e.g., “Biopharmaceutical Production Technology”, Subramanian (ed), 2012, Wiley-VCH; ISBN: 978-3-527-33029-4).

[0123] The recombinant protein can be purified via a process comprising a step of clarification, e.g., filtration, and one or more steps of chromatography, e.g., affinity chromatography, protein A (or G) chromatography, ion exchange (i.e., cation and/or anion) chromatography. Persons skilled in the art will understand that additional purification processes can be used including, without limit, size exclusion chromatography, adsorption chromatography, hydrophobic interaction chromatography, reverse phase chromatography, immunoaffinity chromatography, centrifugation, ultracentrifugation, precipitation, immunoprecipitation, extraction, phase separation, and the like. In general, purification of recombinant proteins expressed by the mammalian cell lines disclosed herein can involve fewer purification steps because of the lower levels of contaminating host cell proteins. As such, the purification time and cost can be reduced as compared to conventional expression systems.

[0124] Recombinant proteins produced by the engineered cell lines disclosed herein have reduced levels of cathepsin D as compared to recombinant proteins produced by the non-engineered parental cell lines. In general, the residual levels of cathepsin D in recombinant proteins produced by the cell lines disclosed herein are less than 100 ppm, less than 30 ppm, less than 10 ppm, less than 3 ppm, less than 1 ppm, less than 0.3 ppm, less than 0.1 ppm, less than 0.03 ppm, less than 0.01 ppm, less than 0.003, or less than 0.001 ppm, as measured using validated methods in accordance with International Conference on Harmonization (ICG) guidelines. Suitable methods include Western immunoblotting assays, ELISA enzyme assays, one- or two-dimensional SDS polyacrylamide gel electrophoresis (SDS-PAGE), 2D-differential in-gel electrophoresis (DIGE), capillary zone electrophoresis-electrospray ionization-tandem mass spectrometry (CZE-ESI-MS/MS), liquid chromatography-tandem mass spectrometry (LC-MS/MS), two-dimensional-liquid chromatography-tandem mass spectrometry (2D-LC-MS/MS), and the like.

[0125] Unless defined otherwise, all technical and scientific terms used herein have the meaning commonly understood by a person skilled in the art to which this invention belongs. The following references provide one of skill with a general definition of many of the terms used in this invention: Singleton et al., Dictionary of Microbiology and Molecular Biology (2nd ed. 1994); The Cambridge Dictionary of Science and Technology (Walker ed., 1988); The Glossary of Genetics, 5th Ed., R. Rieger et al. (eds.), Springer Verlag (1991); and Hale & Marham, The Harper Collins Dictionary of Biology (1991). As used herein, the following terms have the meanings ascribed to them unless specified otherwise.

[0126] When introducing elements of the present disclosure or the preferred embodiments(s) thereof, the articles “a”, “an”, “the” and “said” are intended to mean that there are one or more of the elements. The terms “comprising”, “including” and “having” are intended to be inclusive and mean that there may be additional elements other than the listed elements.

[0127] As used herein, the term “endogenous sequence” refers to a chromosomal sequence that is native to the cell.

[0128] The term “exogenous sequence” refers to a chromosomal sequence that is not native to the cell, or a chromosomal sequence that is moved to a different chromosomal location.

[0129] An “engineered” or “genetically modified” cell refers to a cell in which the genome has been modified or engineered, i.e., the cell contains at least chromosomal sequence that has been engineered to contain an insertion of at least one nucleotide, a deletion of at least one nucleotide, and/or a substitution of at least one nucleotide.

[0130] The terms “genome modification” and “genome editing” refer to processes by which a specific chromosomal sequence is changed such that the chromosomal sequence is modified. The chromosomal sequence may be modified to comprise an insertion of at least one nucleotide, a deletion of at least one nucleotide, and/or a substitution of at least one nucleotide. The modified chromosomal sequence is inactivated such that no product is made. Alternatively, the chromosomal sequence can be modified such that an altered product is made.

[0131] A “gene,” as used herein, refers to a DNA region (including exons and introns) encoding a gene product, as well as all DNA regions which regulate the production of the gene product, whether or not such regulatory sequences are adjacent to coding and/or transcribed sequences. Accordingly, a gene includes, but is not necessarily limited to, promoter sequences, terminators, translational regulatory sequences such as ribosome binding sites and internal ribosome entry sites, enhancers, silencers, insulators, boundary elements, replication origins, matrix attachment sites, and locus control regions.

[0132] The term “heterologous” refers to an entity that is not native to the cell or species of interest.

[0133] The terms “nucleic acid” and “polynucleotide” refer to a deoxyribonucleotide or ribonucleotide polymer, in linear or circular conformation. For the purposes of the present disclosure, these terms are not to be construed as limiting with respect to the length of a polymer. The terms can encompass known analogs of natural nucleotides, as well as nucleotides that are modified in the base, sugar and/or phosphate moieties. In general, an analog of a particular nucleotide has the same base-pairing specificity; i.e., an analog of A will base-pair with T. The nucleotides of a nucleic acid or polynucleotide may be linked by phosphodiester, phosphothioate, phosphoramidite, phosphorodiamidate bonds, or combinations thereof.

[0134] The term “nucleotide” refers to deoxyribonucleotides or ribonucleotides. The nucleotides may be standard nucleotides (i.e., adenosine, guanosine, cytidine, thymidine, and uridine) or nucleotide analogs. A nucleotide analog refers to a nucleotide having a modified purine or pyrimidine base or a modified ribose moiety. A nucleotide analog may be a naturally occurring nucleotide (e.g., inosine) or a non-naturally occurring nucleotide. Non-limiting examples of modifications on the sugar or base moieties of a nucleotide include the addition (or removal) of acetyl groups, amino groups, carboxyl groups, carboxymethyl groups, hydroxyl groups, methyl groups, phosphoryl groups, and thiol groups, as well as the substitution of the carbon and nitrogen atoms of the bases with other atoms (e.g., 7-deaza purines). Nucleotide analogs also include dideoxy nucleotides, 2′-O-methyl nucleotides, locked nucleic acids (LNA), peptide nucleic acids (PNA), and morpholinos.

[0135] The terms “polypeptide” and “protein” are used interchangeably to refer to a polymer of amino acid residues.

[0136] As used herein, the terms “target site” or “target sequence” refer to a nucleic acid sequence that defines a portion of a chromosomal sequence to be modified or edited and to which a targeting endonuclease is engineered to recognize and bind, provided sufficient conditions for binding exist.

[0137] The terms “upstream” and “downstream” refer to locations in a nucleic acid sequence relative to a fixed position. Upstream refers to the region that is 5′ (i.e., near the 5′ end of the strand) to the position and downstream refers to the region that is 3′ (i.e., near the 3′ end of the strand) to the position.

[0138] Techniques for determining nucleic acid and amino acid sequence identity are known in the art. Typically, such techniques include determining the nucleotide sequence of the mRNA for a gene and/or determining the amino acid sequence encoded thereby, and comparing these sequences to a second nucleotide or amino acid sequence. Genomic sequences can also be determined and compared in this fashion. In general, identity refers to an exact nucleotide-to-nucleotide or amino acid-to-amino acid correspondence of two polynucleotides or polypeptide sequences, respectively. Two or more sequences (polynucleotide or amino acid) can be compared by determining their percent identity. The percent identity of two sequences, whether nucleic acid or amino acid sequences, is the number of exact matches between two aligned sequences divided by the length of the shorter sequences and multiplied by 100. An approximate alignment for nucleic acid sequences is provided by the local homology algorithm of Smith and Waterman, Advances in Applied Mathematics 2:482-489 (1981). This algorithm can be applied to amino acid sequences by using the scoring matrix developed by Dayhoff, Atlas of Protein Sequences and Structure, M. O. Dayhoff ed., 5 suppl. 3:353-358, National Biomedical Research Foundation, Washington, D.C., USA, and normalized by Gribskov, Nucl. Acids Res. 14(6):6745-6763 (1986). An exemplary implementation of this algorithm to determine percent identity of a sequence is provided by the Genetics Computer Group (Madison, Wis.) in the “BestFit” utility application. Other suitable programs for calculating the percent identity or similarity between sequences are generally known in the art, for example, another alignment program is BLAST, used with default parameters. For example, BLASTN and BLASTP can be used using the following default parameters: genetic code=standard; filter=none; strand=both; cutoff=60; expect=10; Matrix=BLOSUM62; Descriptions=50 sequences; sort by=HIGH SCORE; Databases=non-redundant, GenBank+EMBL+DDBJ+PDB+GenBank CDS translations+Swiss protein+Spupdate+PIR. Details of these programs can be found on the GenBank website. With respect to sequences described herein, the range of desired degrees of sequence identity is approximately 80% to 100% and any integer value therebetween. Typically the percent identities between sequences are at least 70-75%, preferably 80-82%, more preferably 85-90%, even more preferably 92%, still more preferably 95%, and most preferably 98% sequence identity.

[0139] A “naturally occurring amino acid” is an amino acid that is encoded by the genetic code, as well as those amino acids that are encoded by the genetic code that are modified after synthesis, e.g., hydroxyproline, y-carboxyglutamate, and O-phosphoserine. An amino acid analog is a compound that has the same basic chemical structure as a naturally occurring amino acid, i.e., an a carbon that is bound to a hydrogen, a carboxyl group, an amino group, and an R group, e.g., homoserine, norleucine, methionine sulfoxide, methionine methyl sulfonium. Such analogs can have modified R groups (e.g., norleucine) or modified peptide backbones, but will retain the same basic chemical structure as a naturally occurring amino acid.

[0140] An “amino acid mimetic” is a chemical compound that has a structure that is different from the general chemical structure of an amino acid, but that functions in a manner similar to a naturally occurring amino acid. Examples include a methacryloyl or acryloyl derivative of an amide, β-, γ-, δ-imino acids (such as piperidine-4-carboxylic acid) and the like.

[0141] A “non-naturally occurring amino acid” is a compound that has the same basic chemical structure as a naturally occurring amino acid, but is not incorporated into a growing polypeptide chain by the translation complex. “Non-naturally occurring amino acid” also includes, but is not limited to, amino acids that occur by modification (e.g., posttranslational modifications) of a naturally encoded amino acid (including but not limited to, the 20 common amino acids) but are not themselves naturally incorporated into a growing polypeptide chain by the translation complex. A non-limiting lists of examples of non-naturally occurring amino acids that can be inserted into a polypeptide sequence or substituted for a wild-type residue in polypeptide sequence include P-amino acids, homoamino acids, cyclic amino acids and amino acids with derivatized side chains. Examples include (in the L-form or D-form; abbreviated as in parentheses): citrulline (Cit), homocitrulline (hCit), Na-methylcitrulline (NMeCit), Nα-methylhomocitrulline (Nα-MeHoCit), ornithine (Orn), Nα-Methylornithine (Nα-MeOrn or NMeOrn), sarcosine (Sar), homolysine (hLys or hK), homoarginine (hArg or hR), homoglutamine (hQ), Nα-methylarginine (NMeR), Nα-methylleucine (Nα-MeL or NMeL), N-methylhomolysine (NMeHoK), Nα-methylglutamine (NMeQ), norleucine (Nle), norvaline (Nva), 1,2,3,4-tetrahydroisoquinoline (Tic), Octahydroindole-2-carboxylic acid (Oic), 3-(1-naphthyl)alanine (1-Nal), 3-(2-naphthyl)alanine (2-Nal), 1,2,3,4-tetrahydroisoquinoline (Tic), 2-indanylglycine (IgI), para-iodophenylalanine (pI-Phe), para-aminophenylalanine (4AmP or 4-Amino-Phe), 4-guanidino phenylalanine (Guf), glycyllysine (abbreviated “K(Nε-glycyl)” or “K(glycyl)” or “K(gly)”), nitrophenylalanine (nitrophe), aminophenylalanine (aminophe or Amino-Phe), benzylphenylalanine (benzylphe), γ-carboxyglutamic acid (γ-carboxyglu), hydroxyproline (hydroxypro), p-carboxyl-phenylalanine (Cpa), a-aminoadipic acid (Aad), Nα-methyl valine (NMeVal), N-a-methyl leucine (NMeLeu), Nα-methylnorleucine (NMeNle), cyclopentylglycine (Cpg), cyclohexylglycine (Chg), acetylarginine (acetylarg), α, β-diaminopropionoic acid (Dpr), α, γ-diaminobutyric acid (Dab), diaminopropionic acid (Dap), cyclohexylalanine (Cha), 4-methyl-phenylalanine (MePhe), β, β-diphenyl-alanine (BiPhA), aminobutyric acid (Abu), 4-phenyl-phenylalanine (or biphenylalanine; 4Bip), α-amino-isobutyric acid (Aib), beta-alanine, beta-aminopropionic acid, piperidinic acid, aminocaprioic acid, aminoheptanoic acid, aminopimelic acid, desmosine, diaminopimelic acid, N-ethylglycine, N-ethylaspargine, hydroxylysine, allo-hydroxylysine, isodesmosine, allo-isoleucine, N-methylglycine, N-methylisoleucine, N-methylvaline, 4-hydroxyproline (Hyp), γ-carboxyglutamate, ε-N,N,N-trimethyllysine, ε-N-acetyllysine, O-phosphoserine, N-acetylserine, N-formylmethionine, 3-methylhistidine, 5-hydroxylysine, c-methylarginine, 4-Amino-O-Phthalic Acid (4APA), and other similar amino acids, and derivatized forms of any of those specifically listed.

[0142] The term “isolated nucleic acid molecule” refers to a single or double-stranded polymer of deoxyribonucleotide or ribonucleotide bases read from the 5′ to the 3′ end (e.g., a GIPR nucleic acid sequence provided herein), or an analog thereof, that has been separated from at least about 50 percent of polypeptides, peptides, lipids, carbohydrates, polynucleotides or other materials with which the nucleic acid is naturally found when total nucleic acid is isolated from the source cells. Preferably, an isolated nucleic acid molecule is substantially free from any other contaminating nucleic acid molecules or other molecules that are found in the natural environment of the nucleic acid that would interfere with its use in polypeptide production or its therapeutic, diagnostic, prophylactic or research use.

[0143] The term “isolated polypeptide” refers to a polypeptide (e.g., a GIPR polypeptide sequence provided herein or an antigen binding protein of the present invention) that has been separated from at least about 50 percent of polypeptides, peptides, lipids, carbohydrates, polynucleotides, or other materials with which the polypeptide is naturally found when isolated from a source cell. Preferably, the isolated polypeptide is substantially free from any other contaminating polypeptides or other contaminants that are found in its natural environment that would interfere with its therapeutic, diagnostic, prophylactic or research use.

[0144] A composition of the present invention that includes a GLP-1 receptor agonist of the invention covalently linked, attached, or bound, either directly or indirectly through a linker moiety, to another an anti-GIPR antigen binding protein of the invention or is a “conjugate” or “conjugated” molecule, whether conjugated by chemical means (e.g., post-translationally or post-synthetically).

[0145] The term “encoding” refers to a polynucleotide sequence encoding one or more amino acids. The term does not require a start or stop codon.

[0146] The terms “identical” and percent “identity,” in the context of two or more nucleic acids or polypeptide sequences, refer to two or more sequences or subsequences that are the same. “Percent identity” means the percent of identical residues between the amino acids or nucleotides in the compared molecules and is calculated based on the size of the smallest of the molecules being compared. For these calculations, gaps in alignments (if any) can be addressed by a particular mathematical model or computer program (i.e., an “algorithm”). Methods that can be used to calculate the identity of the aligned nucleic acids or polypeptides include those described in Computational Molecular Biology, (Lesk, A. M., ed.), (1988) New York: Oxford University Press; Biocomputing Informatics and Genome Projects, (Smith, D. W., ed.), 1993, New York: Academic Press; Computer Analysis of Sequence Data, Part I, (Griffin, A. M., and Griffin, H. G., eds.), 1994, New Jersey: Humana Press; von Heinje, G., (1987) Sequence Analysis in Molecular Biology, New York: Academic Press; Sequence Analysis Primer, (Gribskov, M. and Devereux, J., eds.), 1991, New York: M. Stockton Press; and Carillo et al., (1988) SIAM J. Applied Math. 48:1073.

[0147] In calculating percent identity, the sequences being compared are aligned in a way that gives the largest match between the sequences. The computer program used to determine percent identity is the GCG program package, which includes GAP (Devereux et al., (1984) Nucl. Acid Res. 12:387; Genetics Computer Group, University of Wisconsin, Madison, WI). The computer algorithm GAP is used to align the two polypeptides or polynucleotides for which the percent sequence identity is to be determined. The sequences are aligned for optimal matching of their respective amino acid or nucleotide (the “matched span”, as determined by the algorithm). A gap opening penalty (which is calculated as 3× the average diagonal, wherein the “average diagonal” is the average of the diagonal of the comparison matrix being used; the “diagonal” is the score or number assigned to each perfect amino acid match by the particular comparison matrix) and a gap extension penalty (which is usually 1/10 times the gap opening penalty), as well as a comparison matrix such as PAM 250 or BLOSUM 62 are used in conjunction with the algorithm. In certain embodiments, a standard comparison matrix (see, Dayhoff et al., (1978) Atlas of Protein Sequence and Structure 5:345-352 for the PAM 250 comparison matrix; Henikoff et al., (1992) Proc. Natd. Acad. Sci. U.S.A. 89:10915-10919 for the BLOSUM 62 comparison matrix) is also used by the algorithm.

[0148] Recommended parameters for determining percent identity for polypeptides or nucleotide sequences using the GAP program are the following:
[0149] Algorithm: Needleman et al., 1970, J. Mol. Biol. 48:443-453;
[0150] Comparison matrix: BLOSUM 62 from Henikoff et al., 1992, supra;
[0151] Gap Penalty: 12 (but with no penalty for end gaps)
[0152] Gap Length Penalty: 4
[0153] Threshold of Similarity: 0

[0154] Certain alignment schemes for aligning two amino acid sequences can result in matching of only a short region of the two sequences, and this small aligned region can have very high sequence identity even though there is no significant relationship between the two full-length sequences. Accordingly, the selected alignment method (e.g., the GAP program) can be adjusted if so desired to result in an alignment that spans at least 50 contiguous amino acids of the target polypeptide.

[0155] The terms “GIPR polypeptide” and “GIPR protein” are used interchangeably and mean a naturally-occurring wild-type polypeptide expressed in a mammal, such as a human or a mouse, and includes naturally occurring alleles (e.g., naturally occurring allelic forms of human GIPR protein). For purposes of this disclosure, the term “GIPR polypeptide” can be used interchangeably to refer to any full-length GIPR polypeptide, e.g., SEQ ID NO: 3141, which consists of 466 amino acid residues and which is encoded by the nucleotide sequence SEQ ID NO: 3142, or SEQ ID NO: 3143, which consists of 430 amino acid residues and which is encoded by the nucleic acid sequence SEQ ID NO: 3144, or SEQ ID NO: 3145, which consists of 493 amino acid resides and which is encoded by the nucleic acid sequence of SEQ ID NO: 3146, or SEQ ID NO. 3147, which consists of 460 amino acids residues and which is encoded by the nucleic acid sequence of SEQ ID NO: 3148, or SEQ ID NO. 3149, which consists of 230 amino acids residues and which is encoded by the nucleic acid sequence of SEQ ID NO: 3150.

[0156] The term “GIPR polypeptide” also encompasses a GIPR polypeptide in which a naturally occurring GIPR polypeptide sequence (e.g., SEQ ID NOs: 3141, 3143 or 3145) has been modified. Such modifications include, but are not limited to, one or more amino acid substitutions, including substitutions with non-naturally occurring amino acids non-naturally-occurring amino acid analogs and amino acid mimetics.

[0157] In various embodiments, a GIPR polypeptide comprises an amino acid sequence that is at least about 90 percent identical to a naturally-occurring GIPR polypeptide (e.g., SEQ ID NOs: 3141, 3143 or 3145). In other embodiments, a GIPR polypeptide comprises an amino acid sequence that is at least about 95, 96, 97, 98, or 99 percent identical to a naturally-occurring GIPR polypeptide amino acid sequence (e.g., SEQ ID NOs: 3141, 3143 or 3145). Such GIPR polypeptides preferably, but need not, possess at least one activity of a wild-type GIPR polypeptide, such as the ability to bind GIP. The present invention also encompasses nucleic acid molecules encoding such GIPR polypeptide sequences.

[0158] The terms “GIPR activity assay” (also referred to as a “GIPR functional assay”) means an assay that can be used to measure GIP or a GIP binding protein activity in a cellular setting. In one embodiment, the “activity” (or “functional”) assay” can be a cAMP assay in GIPR expressing cells, in which GIP can induce cAMP signal, and the activity of a GIP/GIPR binding protein could be measured in the presence/absence of GIP ligand, in which IC50/EC50 and degree of inhibition/activation can be obtained (Biochemical and Biophysical Research Communications (2002) 290:1420-1426). In another embodiment, the “activity” (or “functional”) assay can be an insulin secretion assay in pancreatic beta cells, in which GIP can induce glucose-dependent insulin secretion, and the activity of a GIP/GIPR binding protein could be measured in the presence/absence of GIP ligand, in which IC50/EC50 and degree of inhibition/activation can be obtained (Biochemical and Biophysical Research Communications (2002) 290:1420-1426).

[0159] The term “GIPR binding assay” means an assay that can be used to measure binding of GIP to GIPR. In one embodiment, “GIPR binding assay” can be an assay using FMAT or FACS that measures fluorescence-labeled GIP binding to GIPR expression cells, and GIP/GIPR binding protein's activity can be measured for displacing fluorescence-labeled GIP binding to GIPR expression cells. In another embodiment, “GIPR binding assay” can be an assay that measures radioactive-labeled GIP binding to GIPR expression cells, and GIP/GIPR binding protein's activity can be measured for displacing radioactive labeled GIP binding to GIPR expression cells (Biochimica et Biophysica Acta (2001) 1547:143-155).

[0160] The terms “GIP”, “Gastric inhibitory polypeptide”, “glucose-dependent insulinotropic peptide” and “GIP ligand” are used interchangeably and mean a naturally-occurring wild-type polypeptide expressed in a mammal, such as a human or a mouse, and includes naturally occurring alleles (e.g., naturally occurring allelic forms of human GIP protein). For purposes of this disclosure, the term “GIP” can be used interchangeably to refer to any mature GIP polypeptide.

[0161] The 42 amino acid sequence of mature human GIP is:

(SEQ ID NO: 3151)
YAEGTFISDY SIAMDKIHQQ DFVNWLLAQK GKKNDWKHNI TQ

[0162] and is encoded by the DNA sequence:
[0163] tatgcggaag gcacctttat tagcgattat agcattgcga tggataaaat tcatcagcag gattttgtga actggctgct ggcgcagaaa ggcaaaaaaa acgattggaa acataacatt acccag (SEQ ID NO: 3152).

[0164] The 42 amino acid sequence of mature murine GIP is:

(SEQ ID NO: 3153)
YAEGTFISDY SIAMDKIRQQ DFVNWLLAQR GKKSDWKHNI TQ

[0165] and is encoded by the DNA sequence:
[0166] tatgcggaag gcacctttat tagcgattat agcattgcga tggataaaat tcgccagcag gattttgtga actggctgct ggcgcagcgc ggcaaaaaaa gcgattggaa acataacatt acccag (SEQ ID NO: 3154).

[0167] The 42 amino acid sequence of mature rat GIP is:

(SEQ ID NO: 3155)
YAEGTFISDY SIAMDKIRQQ DFVNWLLAQK GKKNDWKHNL TQ

[0168] and is encoded by the DNA sequence:
[0169] tatgcggaag gcacctttat tagcgattat agcattgcga tggataaaat tcgccagcag gattttgtga actggctgctg gcgcagaaag geaaaa cgattggaaa cataacctga cccag (SEQ ID NO: 3156).

[0170] A “GIPR antagonist” refers to compounds that reduce or inhibit GIP activation of GIPR. Such antagonists include chemically synthesized small molecules and antigen binding proteins.

[0171] An “antigen binding protein” as used herein means any protein that specifically binds a specified target antigen, such as a GIPR polypeptide (e.g., a human GIPR polypeptide such as provided in SEQ ID NOs: 3141, 3143 or 3145). The term encompasses intact antibodies that comprise at least two full-length heavy chains and two full-length light chains, as well as derivatives, variants, fragments, and mutations thereof. Examples of antibody fragments include Fab, Fab′, F(ab)₂, and Fv fragments. An antigen binding protein also includes domain antibodies such as nanobodies and scFvs as described further below.

[0172] In general, a GIPR antigen binding protein is said to “specifically bind” its target antigen GIPR when the antigen binding protein exhibits essentially background binding to non-GIPR molecules. An antigen binding protein that specifically binds GIPR may, however, cross-react with GIPR polypeptides from different species. Typically, a GIPR antigen binding protein specifically binds human GIPR when the dissociation constant (KD) is ≤10⁻⁷ M as measured via a surface plasma resonance technique (e.g., BIACore, GE-Healthcare Uppsala, Sweden) or Kinetic Exclusion Assay (KinExA, Sapidyne, Boise, Idaho). A GIPR antigen binding protein specifically binds human GIPR with “high affinity” when the KD is 5×10⁻⁹ M, and with “very high affinity” when the KD is 55×10⁻¹⁰ M, as measured using methods described.

[0173] “Antigen binding region” means a protein, or a portion of a protein, that specifically binds a specified antigen. For example, that portion of an antigen binding protein that contains the amino acid residues that interact with an antigen and confer on the antigen binding protein its specificity and affinity for the antigen is referred to as “antigen binding region.” An antigen binding region typically includes one or more “complementary binding regions” (“CDRs”) of an immunoglobulin, single-chain immunoglobulin, or camelid antibody. Certain antigen binding regions also include one or more “framework” regions. A “CDR” is an amino acid sequence that contributes to antigen binding specificity and affinity. “Framework” regions can aid in maintaining the proper conformation of the CDRs to promote binding between the antigen binding region and an antigen.

[0174] A “recombinant protein”, including a recombinant GIPR antigen binding protein, is a protein made using recombinant techniques, i.e., through the expression of a recombinant nucleic acid as described herein. Methods and techniques for the production of recombinant proteins are well known in the art.

[0175] The term “antibody” refers to an intact immunoglobulin of any isotype, or a fragment thereof that can compete with the intact antibody for specific binding to the target antigen, and includes, for instance, chimeric, humanized, fully human, and bispecific antibodies. An “antibody” as such is a species of an antigen binding protein. An intact antibody generally will comprise at least two full-length heavy chains and two full-length light chains. Antibodies may be derived solely from a single source, or may be “chimeric,” that is, different portions of the antibody may be derived from two different antibodies as described further below. The antigen binding proteins, antibodies, or binding fragments may be produced in hybridomas, by recombinant DNA techniques, or by enzymatic or chemical cleavage of intact antibodies.

[0176] The term “light chain” as used with respect to an antibody or fragments thereof includes a full-length light chain and fragments thereof having sufficient variable region sequence to confer binding specificity. A full-length light chain includes a variable region domain, VL, and a constant region domain, CL. The variable region domain of the light chain is at the amino-terminus of the polypeptide. Light chains include kappa chains and lambda chains.

[0177] The term “heavy chain” as used with respect to an antibody or fragment thereof includes a full-length heavy chain and fragments thereof having sufficient variable region sequence to confer binding specificity. A full-length heavy chain includes a variable region domain, VH, and three constant region domains, CHI, CH2, and CH3. The VH domain is at the amino-terminus of the polypeptide, and the CH domains are at the carboxyl-terminus, with the CH3 being closest to the carboxy-terminus of the polypeptide. Heavy chains may be of any isotype, including IgG (including IgG1, IgG2, IgG3 and IgG4 subtypes), IgA (including IgA1 and IgA2 subtypes), IgM and IgE.

[0178] The term “immunologically functional fragment” (or simply “fragment”) of an antibody or immunoglobulin chain (heavy or light chain), as used herein, is an antigen binding protein comprising a portion (regardless of how that portion is obtained or synthesized) of an antibody that lacks at least some of the amino acids present in a full-length chain but which is capable of specifically binding to an antigen. Such fragments are biologically active in that they bind specifically to the target antigen and can compete with other antigen binding proteins, including intact antibodies, for specific binding to a given epitope.

[0179] These biologically active fragments may be produced by recombinant DNA techniques, or may be produced by enzymatic or chemical cleavage of antigen binding proteins, including intact antibodies. Immunologically functional immunoglobulin fragments include, but are not limited to, Fab, Fab′, and F(ab)₂ fragments.

[0180] In another embodiment, Fvs, domain antibodies and scFvs, and may be derived from an antibody of the present invention.

[0181] It is contemplated further that a functional portion of the antigen binding proteins disclosed herein, for example, one or more CDRs, could be covalently bound to a second protein or to a small molecule to create a therapeutic agent directed to a particular target in the body, possessing bifunctional therapeutic properties, or having a prolonged serum half-life.

[0182] A “Fab fragment” is comprised of one light chain and the CH1 and variable regions of one heavy chain. The heavy chain of a Fab molecule cannot form a disulfide bond with another heavy chain molecule.

[0183] An “Fc” region contains two heavy chain fragments comprising the CH2 and CH3 domains of an antibody. The two heavy chain fragments are held together by two or more disulfide bonds and by hydrophobic interactions of the CH3 domains.

[0184] An “Fab′ fragment” contains one light chain and a portion of one heavy chain that contains the VH domain and the CHI domain and also the region between the CHI and CH2 domains, such that an interchain disulfide bond can be formed between the two heavy chains of two Fab′ fragments to form an F(ab)₂ molecule.

[0185] An “F(ab)₂ fragment” contains two light chains and two heavy chains containing a portion of the constant region between the CHI and CH2 domains, such that an interchain disulfide bond is formed between the two heavy chains. A F(ab)₂ fragment thus is composed of two Fab′ fragments that are held together by a disulfide bond between the two heavy chains.

[0186] The “Fv region” comprises the variable regions from both the heavy and light chains, but lacks the constant regions.

[0187] “Single chain antibodies” or “scFvs” are Fv molecules in which the heavy and light chain variable regions have been connected by a flexible linker to form a single polypeptide chain, which forms an antigen-binding region. scFvs are discussed in detail in International Patent Application Publication No. WO 88/01649 and U.S. Pat. Nos. 4,946,778 and 5,260,203, the disclosures of which are incorporated by reference.

[0188] A “domain antibody” or “single chain immunoglobulin” is an immunologically functional immunoglobulin fragment containing only the variable region of a heavy chain or the variable region of a light chain. Examples of domain antibodies include Nanobodies®. In some instances, two or more VH regions are covalently joined with a peptide linker to create a bivalent domain antibody. The two VH regions of a bivalent domain antibody may target the same or different antigens.

[0189] A “bivalent antigen binding protein” or “bivalent antibody” comprises two antigen binding regions. In some instances, the two binding regions have the same antigen specificities. Bivalent antigen binding proteins and bivalent antibodies may be bispecific, see, infra.

[0190] A multispecific antigen binding protein” or “multispecific antibody” is one that targets more than one antigen or epitope.

[0191] A “bispecific,” “dual-specific” or “bifunctional” antigen binding protein or antibody is a hybrid antigen binding protein or antibody, respectively, having two different antigen binding sites. Bispecific antigen binding proteins and antibodies are a species of multispecific antigen binding protein or multispecific antibody and may be produced by a variety of methods including, but not limited to, fusion of hybridomas or linking of Fab′ fragments. See, e.g., Songsivilai and Lachmann, 1990, Clin. Exp. Immunol. 79:315-321; Kostelny et al., 1992, J. Immunol. 148:1547-1553. The two binding sites of a bispecific antigen binding protein or antibody will bind to two different epitopes, which may reside on the same or different protein targets.

[0192] The term “compete” when used in the context of antigen binding proteins (e.g., antibodies) means competition between antigen binding proteins is determined by an assay in which the antigen binding protein (e.g., antibody or immunologically functional fragment thereof) under test prevents or inhibits specific binding of a reference antigen binding protein to a common antigen (e.g., GIPR or a fragment thereof). Numerous types of competitive binding assays can be used, for example: solid phase direct or indirect radioimmunoassay (RIA), solid phase direct or indirect enzyme immunoassay (EIA), sandwich competition assay (see, e.g., Stahli et al., 1983, Methods in Enzymology 9:242-253); solid phase direct biotin-avidin EIA (see, e.g., Kirkland et al., 1986, J. Immunol. 137:3614-3619) solid phase direct labeled assay, solid phase direct labeled sandwich assay (see, e.g., Harlow and Lane, 1988, Antibodies, A Laboratory Manual, Cold Spring Harbor Press); solid phase direct label RIA using I-125 label (see, e.g., Morel et al., 1988, Molec. Immunol. 25:7-15); solid phase direct biotin-avidin EIA (see, e.g., Cheung, et al., 1990, Virology 176:546-552); and direct labeled RIA (Moldenhauer et al., 1990, Scand. J. Immunol. 32:77-82). Typically, such an assay involves the use of purified antigen bound to a solid surface or cells bearing either of these, an unlabelled test antigen binding protein and a labeled reference antigen binding protein. Competitive inhibition is measured by determining the amount of label bound to the solid surface or cells in the presence of the test antigen binding protein. Usually the test antigen binding protein is present in excess. Additional details regarding methods for determining competitive binding are provided in the examples herein. Usually, when a competing antigen binding protein is present in excess, it will inhibit specific binding of a reference antigen binding protein to a common antigen by at least 40%, 45%, 50%, 55%, 60%, 65%, 70% or 75%. In some instances, binding is inhibited by at least 80%, 85%, 90%, 95%, or 97% or more.

[0193] The term “antigen” refers to a molecule or a portion of a molecule capable of being bound by a selective binding agent, such as an antigen binding protein (including, e.g., an antibody), and additionally capable of being used in an animal to produce antibodies capable of binding to that antigen. An antigen may possess one or more epitopes that are capable of interacting with different antigen binding proteins, e.g., antibodies.

[0194] The term “epitope” is the portion of a molecule that is bound by an antigen binding protein (for example, an antibody). The term includes any determinant capable of specifically binding to an antigen binding protein, such as an antibody. An epitope can be contiguous or non-contiguous (discontinuous) (e.g., in a polypeptide, amino acid residues that are not contiguous to one another in the polypeptide sequence but that within in context of the molecule are bound by the antigen binding protein). A conformational epitope is an epitope that exists within the conformation of an active protein but is not present in a denatured protein. In certain embodiments, epitopes may be mimetic in that they comprise a three dimensional structure that is similar to an epitope used to generate the antigen binding protein, yet comprise none or only some of the amino acid residues found in that epitope used to generate the antigen binding protein. Most often, epitopes reside on proteins, but in some instances may reside on other kinds of molecules, such as nucleic acids. Epitope determinants may include chemically active surface groupings of molecules such as amino acids, sugar side chains, phosphoryl or sulfonyl groups, and may have specific three dimensional structural characteristics, and/or specific charge characteristics. Generally, antigen binding proteins specific for a particular target antigen will preferentially recognize an epitope on the target antigen in a complex mixture of proteins and/or macromolecules.

[0195] As used herein, “substantially pure” means that the described species of molecule is the predominant species present, that is, on a molar basis it is more abundant than any other individual species in the same mixture. In certain embodiments, a substantially pure molecule is a composition wherein the object species comprises at least 50% (on a molar basis) of all macromolecular species present. In other embodiments, a substantially pure composition will comprise at least 80%, 85%, 90%, 95%, 96%, 97%, 98%, or 99% of all macromolecular species present in the composition. In other embodiments, the object species is purified to essential homogeneity wherein contaminating species cannot be detected in the composition by conventional detection methods and thus the composition consists of a single detectable macromolecular species.

[0196] The term “treating” refers to any indicia of success in the treatment or amelioration of an injury, pathology or condition, including any objective or subjective parameter such as abatement; remission; diminishing of symptoms or making the injury, pathology or condition more tolerable to the patient; slowing in the rate of degeneration or decline; making the final point of degeneration less debilitating; improving a patient's physical or mental well-being. The treatment or amelioration of symptoms can be based on objective or subjective parameters; including the results of a physical examination, neuropsychiatric exams, and/or a psychiatric evaluation. For example, certain methods presented herein successfully treat cardiovascular disease such as atherosclerosis by decreasing the incidence of cardiovascular disease, causing remission of cardiovascular disease and/or ameliorating a symptom associated with cardiovascular disease.

[0197] An “effective amount” is generally an amount sufficient to reduce the severity and/or frequency of symptoms, eliminate the symptoms and/or underlying cause, prevent the occurrence of symptoms and/or their underlying cause, and/or improve or remediate the damage that results from or is associated with the disease state (e.g., diabetes, obesity, dyslipidemia, elevated glucose levels, elevated insulin levels or diabetic nephropathy. In some embodiments, the effective amount is a therapeutically effective amount or a prophylactically effective amount. A “therapeutically effective amount” is an amount sufficient to remedy a disease state (e.g. atherosclerosis) or symptoms, particularly a state or symptoms associated with the disease state, or otherwise prevent, hinder, retard or reverse the progression of the disease state or any other undesirable symptom associated with the disease in any way whatsoever. A “prophylactically effective amount” is an amount of a pharmaceutical composition that, when administered to a subject, will have the intended prophylactic effect, e.g., preventing or delaying the onset (or reoccurrence) of the disease state, or reducing the likelihood of the onset (or reoccurrence) of the disease state or associated symptoms. The full therapeutic or prophylactic effect does not necessarily occur by administration of one dose, and may occur only after administration of a series of doses. Thus, a therapeutically or prophylactically effective amount may be administered in one or more administrations.

[0198] The terms “therapeutically effective dose” and “therapeutically effective amount,” as used herein, means an amount of a GIPR binding protein that elicits a biological or medicinal response in a tissue system, animal, or human being sought by a researcher, physician, or other clinician, which includes alleviation or amelioration of the symptoms of the disease or disorder being treated, i.e., an amount of a GIPR binding protein that supports an observable level of one or more desired biological or medicinal response, for example lowering blood glucose, insulin, triglyceride, or cholesterol levels; reducing body weight; or improving glucose tolerance, energy expenditure, or insulin sensitivity.

[0199] The term “polynucleotide” or “nucleic acid” includes both single-stranded and double-stranded nucleotide polymers. The nucleotides comprising the polynucleotide can be ribonucleotides or deoxyribonucleotides or a modified form of either type of nucleotide. The modifications include base modifications such as bromouridine and inosine derivatives, ribose modifications such as 2′,3′-dideoxyribose, and internucleotide linkage modifications such as phosphorothioate, phosphorodithioate, phosphoroselenoate, phosphorodiselenoate, phosphoroanilothioate, phoshoraniladate and phosphoroamidate.

[0200] The term “oligonucleotide” means a polynucleotide comprising 200 or fewer nucleotides. In some embodiments, oligonucleotides are 10 to 60 bases in length. In other embodiments, oligonucleotides are 12, 13, 14, 15, 16, 17, 18, 19, or 20 to 40 nucleotides in length. Oligonucleotides may be single stranded or double stranded, e.g., for use in the construction of a mutant gene. Oligonucleotides may be sense or antisense oligonucleotides. An oligonucleotide can include a label, including a radiolabel, a fluorescent label, a hapten or an antigenic label, for detection assays. Oligonucleotides may be used, for example, as PCR primers, cloning primers or hybridization probes.

[0201] An “isolated nucleic acid molecule” means a DNA or RNA of genomic, mRNA, cDNA, or synthetic origin or some combination thereof which is not associated with all or a portion of a polynucleotide in which the isolated polynucleotide is found in nature, or is linked to a polynucleotide to which it is not linked in nature. For purposes of this disclosure, it should be understood that “a nucleic acid molecule comprising” a particular nucleotide sequence does not encompass intact chromosomes. Isolated nucleic acid molecules “comprising” specified nucleic acid sequences may include, in addition to the specified sequences, coding sequences for up to ten or even up to twenty other proteins or portions thereof, or may include operably linked regulatory sequences that control expression of the coding region of the recited nucleic acid sequences, and/or may include vector sequences.

[0202] Unless specified otherwise, the left-hand end of any single-stranded polynucleotide sequence discussed herein is the 5′ end; the left-hand direction of double-stranded polynucleotide sequences is referred to as the 5′ direction. The direction of 5′ to 3′ addition of nascent RNA transcripts is referred to as the transcription direction; sequence regions on the DNA strand having the same sequence as the RNA transcript that are 5′ to the 5′ end of the RNA transcript are referred to as “upstream sequences;” sequence regions on the DNA strand having the same sequence as the RNA transcript that are 3′ to the 3′ end of the RNA transcript are referred to as “downstream sequences.”

[0203] The term “control sequence” refers to a polynucleotide sequence that can affect the expression and processing of coding sequences to which it is ligated. The nature of such control sequences may depend upon the host organism. In particular embodiments, control sequences for prokaryotes may include a promoter, a ribosomal binding site, and a transcription termination sequence. For example, control sequences for eukaryotes may include promoters comprising one or a plurality of recognition sites for transcription factors, transcription enhancer sequences, and transcription termination sequences. “Control sequences” can include leader sequences and/or fusion partner sequences.

[0204] The term “vector” means any molecule or entity (e.g., nucleic acid, plasmid, bacteriophage or virus) used to transfer protein coding information into a host cell.

[0205] The term “expression vector” or “expression construct” refers to a vector that is suitable for transformation of a host cell and contains nucleic acid sequences that direct and/or control (in conjunction with the host cell) expression of one or more heterologous coding regions operatively linked thereto. An expression construct may include, but is not limited to, sequences that affect or control transcription, translation, and, if introns are present, affect RNA splicing of a coding region operably linked thereto.

[0206] As used herein, “operably linked” means that the components to which the term is applied are in a relationship that allows them to carry out their inherent functions under suitable conditions. For example, a control sequence in a vector that is “operably linked” to a protein coding sequence is ligated thereto so that expression of the protein coding sequence is achieved under conditions compatible with the transcriptional activity of the control sequences.

[0207] The term “host cell” means a cell that has been transformed with a nucleic acid sequence and thereby expresses a gene of interest. The term includes the progeny of the parent cell, whether or not the progeny is identical in morphology or in genetic make-up to the original parent cell, so long as the gene of interest is present.

[0208] The terms “polypeptide” or “protein” are used interchangeably herein to refer to a polymer of amino acid residues. The terms also apply to amino acid polymers in which one or more amino acid residues is an analog or mimetic of a corresponding naturally occurring amino acid, as well as to naturally occurring amino acid polymers. The terms can also encompass amino acid polymers that have been modified, e.g., by the addition of carbohydrate residues to form glycoproteins, or phosphorylated. Polypeptides and proteins can be produced by a naturally-occurring and non-recombinant cell; or it is produced by a genetically-engineered or recombinant cell, and comprise molecules having the amino acid sequence of the native protein, or molecules having deletions from, additions to, and/or substitutions of one or more amino acids of the native sequence. The terms “polypeptide” and “protein” specifically encompass GIPR antigen binding proteins, antibodies, or sequences that have deletions from, additions to, and/or substitutions of one or more amino acids of an antigen-binding protein. The term “polypeptide fragment” refers to a polypeptide that has an amino-terminal deletion, a carboxyl-terminal deletion, and/or an internal deletion as compared with the full-length protein. Such fragments may also contain modified amino acids as compared with the full-length protein. In certain embodiments, fragments are about five to 500 amino acids long. For example, fragments may be at least 5, 6, 8, 10, 14, 20, 50, 70, 100, 110, 150, 200, 250, 300, 350, 400, or 450 amino acids long. Useful polypeptide fragments include immunologically functional fragments of antibodies, including binding domains.

[0209] The term “isolated protein” means that a subject protein (1) is free of at least some other proteins with which it would normally be found, (2) is essentially free of other proteins from the same source, e.g., from the same species, (3) is expressed by a cell from a different species, (4) has been separated from at least about 50 percent of polynucleotides, lipids, carbohydrates, or other materials with which it is associated in nature, (5) is operably associated (by covalent or noncovalent interaction) with a polypeptide with which it is not associated in nature, or (6) does not occur in nature. Typically, an “isolated protein” constitutes at least about 5%, at least about 10%, at least about 25%, or at least about 50% of a given sample. Genomic DNA, cDNA, mRNA or other RNA, of synthetic origin, or any combination thereof may encode such an isolated protein. Preferably, the isolated protein is substantially free from proteins or polypeptides or other contaminants that are found in its natural environment that would interfere with its therapeutic, diagnostic, prophylactic, research or other use.

[0210] A “variant” of a polypeptide (e.g., an antigen binding protein such as an antibody) comprises an amino acid sequence wherein one or more amino acid residues are inserted into, deleted from and/or substituted into the amino acid sequence relative to another polypeptide sequence. Variants include fusion proteins.

[0211] A “derivative” of a polypeptide is a polypeptide (e.g., an antigen binding protein such as an antibody) that has been chemically modified in some manner distinct from insertion, deletion, or substitution variants, e.g., via conjugation to another chemical moiety.

[0212] The term “naturally occurring” as used throughout the specification in connection with biological materials such as polypeptides, nucleic acids, host cells, and the like, refers to materials which are found in nature.

[0213] A “subject” or “patient” as used herein can be any mammal. In a typical embodiment, the subject or patient is a human.

[0214] As disclosed herein, a GIPR polypeptide described by the instant disclosure can be engineered and/or produced using standard molecular biology methodology. In various examples, a nucleic acid sequence encoding a GIPR, which can comprise all or a portion of SEQ ID NOs:1, 3 or 5, can be isolated and/or amplified from genomic DNA, or cDNA using appropriate oligonucleotide primers. Primers can be designed based on the nucleic and amino acid sequences provided herein according to standard (RT)-PCR amplification techniques. The amplified GIPR nucleic acid can then be cloned into a suitable vector and characterized by DNA sequence analysis.

[0215] Oligonucleotides for use as probes in isolating or amplifying all or a portion of the GIPR sequences provided herein can be designed and generated using standard synthetic techniques, e.g., automated DNA synthesis apparatus, or can be isolated from a longer sequence of DNA.

[0216] In one aspect the present disclosure is directed to a method for producing an antibody peptide conjugate, the method comprising:

[0217] a) expressing the antibody in a mammalian cell wherein the mammalian cell is a cathepsin D knock out cell, and wherein the antibody comprises a cysteine or non-canonical amino acid amino acid substitution at one or more conjugation site(s);
[0218] b) purifying the antibody; and
[0219] c) conjugating a peptide to the antibody at the conjugation site(s).

[0220] The cathepsin D need not affect or cleave the antibody in order to have an adverse affect on the antibody peptide conjugate. Rather, the present invention is directed to methods of avoiding clipping of a conjugated peptide that will be or is conjugated to the antibody produced by the cell line.

[0221] In one embodiment, both alleles of cathepsin D of the mammalian cell are knocked out.

[0222] In one embodiment, the mammalian cell is a CHO cell.

[0223] In one embodiment, the antibody is an anti-GIPR antibody.

[0224] In one embodiment, the peptide is a GLP-1 agonist.

[0225] In one embodiment, the alleles of cathepsin D are knocked out using CRISPR or using zinc-finger technology.

[0226] In one embodiment, the antibody is a monoclonal antibody, a recombinant antibody, a human antibody, a humanized antibody, or a chimeric antibody.

[0227] In one embodiment, the antibody is a human antibody.

[0228] In one embodiment, the antibody is a monoclonal antibody.

[0229] In one embodiment, the antibody is a human antibody and wherein the antibody is of the IgG1-, IgG2-IgG3- or IgG4-type.

[0230] In one embodiment, the antibody is of the IgG1- or the IgG2-type.

[0231] In one embodiment, the antibody inhibits binding of GIP to the extracellular portion of human GIPR.

[0232] In one embodiment, the CH1-hinge-CH2-CH3 domain of the antibody heavy chain comprises

(SEQ ID NO: 3310)
ASTKGPSVFPLAPSSKSTSGGTAALGCLVKDYFPEPVTVSWNSGALTSGV
HTFPAVLQSSGLYSLSSVVTVPSSSLGTQTYICNVNHKPSNTKVDKKVEP
KSCDKTHTCPPCPAPELLGGPSVFLFPPKPKDTLMISRTPEVTCVVVDVS
HEDPCVKFNWYVDGVEVHNAKTKPCEEQYGSTYRCVSVLTVLHQDWLNGK
EYKCKVSNKALPAPIEKTISKAKGQPREPQVYTLPPSREEMTKNQVSLTC
LVKGFYPSDIAVEWESNGQPENNYKTTPPVLDSDGSFFLYSKLTVDKSRW
QQGNVFSCSVMHEALHNHYTQKSLSLSPGK.

[0233] In one embodiment, the antibody comprises a CDRL1, a CDRL2, a CDRL3, a CDRH1, a CDRH2, and a CDRH3, wherein the CDRL1 comprises a sequence selected from the group consisting of SEQ ID NOs: 629-785; the CDRL2 comprises a sequence selected from the group consisting of SEQ ID NOs: 786-942; the CDRL3 comprises a sequence selected from the group consisting of SEQ ID NOs: 943-1099; the CDRH1 comprises a sequence selected from the group consisting of SEQ ID NOs: 1100-1256; the CDRH2 comprises a sequence selected from the group consisting of SEQ ID NOs: 1257-1413; and the CDRH3 comprises a sequence selected from the group consisting of SEQ ID NOs: 1414-1570, wherein
[0234] the antibody or functional fragment thereof comprises a cysteine or non-canonical amino acid amino acid substitution at one or more conjugation site(s) selected from the group consisting of
[0235] D70 of the antibody light chain relative to reference sequence SEQ ID NO: 455,
[0236] E276 of the antibody heavy chain relative to reference sequence SEQ ID NO: 612, and
[0237] T363 of the antibody heavy chain relative to reference sequence SEQ ID NO: 612.

[0238] In one embodiment, the antibody comprises a CDRL1, a CDRL2, a CDRL3, a CDRH1, a CDRH2, and a CDRH3, wherein each CDRL1, CDRL2, CDRL3, CDRH1, CDRH2, and CDRH3, respectively, comprises a sequence selected from the group consisting of SEQ ID NO: 629, SEQ ID NO: 786, SEQ ID NO: 943, SEQ ID NO: 1100, SEQ ID NO: 1257, and SEQ ID NO: 1414; SEQ ID NO: 630, SEQ ID NO: 787, SEQ ID NO: 944, SEQ ID NO: 1101, SEQ ID NO: 1258, and SEQ ID NO: 1415; SEQ ID NO: 631, SEQ ID NO: 788, SEQ ID NO: 945, SEQ ID NO: 1102, SEQ ID NO: 1259, and SEQ ID NO: 1416; SEQ ID NO: 632, SEQ ID NO: 789, SEQ ID NO: 946, SEQ ID NO: 1103, SEQ ID NO: 1260, and SEQ ID NO: 1417; SEQ ID NO: 633, SEQ ID NO: 790, SEQ ID NO: 947, SEQ ID NO: 1104, SEQ ID NO: 1261, and SEQ ID NO: 1418; SEQ ID NO: 634, SEQ ID NO: 791, SEQ ID NO: 948, SEQ ID NO: 1105, SEQ ID NO: 1262, and SEQ ID NO: 1419; SEQ ID NO: 635, SEQ ID NO: 792, SEQ ID NO: 949, SEQ ID NO: 1106, SEQ ID NO: 1263, and SEQ ID NO: 1420; SEQ ID NO: 636, SEQ ID NO: 793, SEQ ID NO: 950, SEQ ID NO: 1107, SEQ ID NO: 1264, and SEQ ID NO: 1421; SEQ ID NO: 637, SEQ ID NO: 794, SEQ ID NO: 951, SEQ ID NO: 1108, SEQ ID NO: 1265, and SEQ ID NO: 1422; SEQ ID NO: 638, SEQ ID NO: 795, SEQ ID NO: 952, SEQ ID NO: 1109, SEQ ID NO: 1266, and SEQ ID NO: 1423; SEQ ID NO: 639, SEQ ID NO: 796, SEQ ID NO: 953, SEQ ID NO: 1110, SEQ ID NO: 1267, and SEQ ID NO: 1424; SEQ ID NO: 640, SEQ ID NO: 797, SEQ ID NO: 954, SEQ ID NO: 1111, SEQ ID NO: 1268, and SEQ ID NO: 1425; SEQ ID NO: 641, SEQ ID NO: 798, SEQ ID NO: 955, SEQ ID NO: 1112, SEQ ID NO: 1269, and SEQ ID NO: 1426; SEQ ID NO: 642, SEQ ID NO: 799, SEQ ID NO: 956, SEQ ID NO: 1113, SEQ ID NO: 1270, and SEQ ID NO: 1427; SEQ ID NO: 643, SEQ ID NO: 800, SEQ ID NO: 957, SEQ ID NO: 1114, SEQ ID NO: 1271, and SEQ ID NO: 1428; SEQ ID NO: 644, SEQ ID NO: 801, SEQ ID NO: 958, SEQ ID NO: 1115, SEQ ID NO: 1272, and SEQ ID NO: 1429; SEQ ID NO: 645, SEQ ID NO: 802, SEQ ID NO: 959, SEQ ID NO: 1116, SEQ ID NO: 1273, and SEQ ID NO: 1430; SEQ ID NO: 646, SEQ ID NO: 803, SEQ ID NO: 960, SEQ ID NO: 1117, SEQ ID NO: 1274, and SEQ ID NO: 1431; SEQ ID NO: 647, SEQ ID NO: 804, SEQ ID NO: 961, SEQ ID NO: 1118, SEQ ID NO: 1275, and SEQ ID NO: 1432; SEQ ID NO: 648, SEQ ID NO: 805, SEQ ID NO: 962, SEQ ID NO: 1119, SEQ ID NO: 1276, and SEQ ID NO: 1433; SEQ ID NO: 649, SEQ ID NO: 806, SEQ ID NO: 963, SEQ ID NO: 1120, SEQ ID NO: 1277, and SEQ ID NO: 1434; SEQ ID NO: 650, SEQ ID NO: 807, SEQ ID NO: 964, SEQ ID NO: 1121, SEQ ID NO: 1278, and SEQ ID NO: 1435; SEQ ID NO: 651, SEQ ID NO: 808, SEQ ID NO: 965, SEQ ID NO: 1122, SEQ ID NO: 1279, and SEQ ID NO: 1436; SEQ ID NO: 652, SEQ ID NO: 809, SEQ ID NO: 966, SEQ ID NO: 1123, SEQ ID NO: 1280, and SEQ ID NO: 1437; SEQ ID NO: 653, SEQ ID NO: 810, SEQ ID NO: 967, SEQ ID NO: 1124, SEQ ID NO: 1281, and SEQ ID NO: 1438; SEQ ID NO: 654, SEQ ID NO: 811, SEQ ID NO: 968, SEQ ID NO: 1125, SEQ ID NO: 1282, and SEQ ID NO: 1439; SEQ ID NO: 655, SEQ ID NO: 812, SEQ ID NO: 969, SEQ ID NO: 1126, SEQ ID NO: 1283, and SEQ ID NO: 1440; SEQ ID NO: 656, SEQ ID NO: 813, SEQ ID NO: 970, SEQ ID NO: 1127, SEQ ID NO: 1284, and SEQ ID NO: 1441; SEQ ID NO: 657, SEQ ID NO: 814, SEQ ID NO: 971, SEQ ID NO: 1128, SEQ ID NO: 1285, and SEQ ID NO: 1442; SEQ ID NO: 658, SEQ ID NO: 815, SEQ ID NO: 972, SEQ ID NO: 1129, SEQ ID NO: 1286, and SEQ ID NO: 1443; SEQ ID NO: 659, SEQ ID NO: 816, SEQ ID NO: 973, SEQ ID NO: 1130, SEQ ID NO: 1287, and SEQ ID NO: 1444; SEQ ID NO: 660, SEQ ID NO: 817, SEQ ID NO: 974, SEQ ID NO: 1131, SEQ ID NO: 1288, and SEQ ID NO: 1445; SEQ ID NO: 661, SEQ ID NO: 818, SEQ ID NO: 975, SEQ ID NO: 1132, SEQ ID NO: 1289, and SEQ ID NO: 1446; SEQ ID NO: 662, SEQ ID NO: 819, SEQ ID NO: 976, SEQ ID NO: 1133, SEQ ID NO: 1290, and SEQ ID NO: 1447; SEQ ID NO: 663, SEQ ID NO: 820, SEQ ID NO: 977, SEQ ID NO: 1134, SEQ ID NO: 1291, and SEQ ID NO: 1448; SEQ ID NO: 664, SEQ ID NO: 821, SEQ ID NO: 978, SEQ ID NO: 1135, SEQ ID NO: 1292, and SEQ ID NO: 1449; SEQ ID NO: 665, SEQ ID NO: 822, SEQ ID NO: 979, SEQ ID NO: 1136, SEQ ID NO: 1293, and SEQ ID NO: 1450; SEQ ID NO: 666, SEQ ID NO: 823, SEQ ID NO: 980, SEQ ID NO: 1137, SEQ ID NO: 1294, and SEQ ID NO: 1451; SEQ ID NO: 667, SEQ ID NO: 824, SEQ ID NO: 981, SEQ ID NO: 1138, SEQ ID NO: 1295, and SEQ ID NO: 1452; SEQ ID NO: 668, SEQ ID NO: 825, SEQ ID NO: 982, SEQ ID NO: 1139, SEQ ID NO: 1296, and SEQ ID NO: 1453; SEQ ID NO: 669, SEQ ID NO: 826, SEQ ID NO: 983, SEQ ID NO: 1140, SEQ ID NO: 1297, and SEQ ID NO: 1454; SEQ ID NO: 670, SEQ ID NO: 827, SEQ ID NO: 984, SEQ ID NO: 1141, SEQ ID NO: 1298, and SEQ ID NO: 1455; SEQ ID NO: 671, SEQ ID NO: 828, SEQ ID NO: 985, SEQ ID NO: 1142, SEQ ID NO: 1299, and SEQ ID NO: 1456; SEQ ID NO: 672, SEQ ID NO: 829, SEQ ID NO: 986, SEQ ID NO: 1143, SEQ ID NO: 1300, and SEQ ID NO: 1457; SEQ ID NO: 673, SEQ ID NO: 830, SEQ ID NO: 987, SEQ ID NO: 1144, SEQ ID NO: 1301, and SEQ ID NO: 1458; SEQ ID NO: 674, SEQ ID NO: 831, SEQ ID NO: 988, SEQ ID NO: 1145, SEQ ID NO: 1302, and SEQ ID NO: 1459; SEQ ID NO: 675, SEQ ID NO: 832, SEQ ID NO: 989, SEQ ID NO: 1146, SEQ ID NO: 1303, and SEQ ID NO: 1460; SEQ ID NO: 676, SEQ ID NO: 833, SEQ ID NO: 990, SEQ ID NO: 1147, SEQ ID NO: 1304, and SEQ ID NO: 1461; SEQ ID NO: 677, SEQ ID NO: 834, SEQ ID NO: 991, SEQ ID NO: 1148, SEQ ID NO: 1305, and SEQ ID NO: 1462; SEQ ID NO: 678, SEQ ID NO: 835, SEQ ID NO: 992, SEQ ID NO: 1149, SEQ ID NO: 1306, and SEQ ID NO: 1463; SEQ ID NO: 679, SEQ ID NO: 836, SEQ ID NO: 993, SEQ ID NO: 1150, SEQ ID NO: 1307, and SEQ ID NO: 1464; SEQ ID NO: 680, SEQ ID NO: 837, SEQ ID NO: 994, SEQ ID NO: 1151, SEQ ID NO: 1308, and SEQ ID NO: 1465; SEQ ID NO: 681, SEQ ID NO: 838, SEQ ID NO: 995, SEQ ID NO: 1152, SEQ ID NO: 1309, and SEQ ID NO: 1466; SEQ ID NO: 682, SEQ ID NO: 839, SEQ ID NO: 996, SEQ ID NO: 1153, SEQ ID NO: 1310, and SEQ ID NO: 1467; SEQ ID NO: 683, SEQ ID NO: 840, SEQ ID NO: 997, SEQ ID NO: 1154, SEQ ID NO: 1311, and SEQ ID NO: 1468; SEQ ID NO: 684, SEQ ID NO: 841, SEQ ID NO: 998, SEQ ID NO: 1155, SEQ ID NO: 1312, and SEQ ID NO: 1469; SEQ ID NO: 685, SEQ ID NO: 842, SEQ ID NO: 999, SEQ ID NO: 1156, SEQ ID NO: 1313, and SEQ ID NO: 1470; SEQ ID NO: 686, SEQ ID NO: 843, SEQ ID NO: 1000, SEQ ID NO: 1157, SEQ ID NO: 1314, and SEQ ID NO: 1471; SEQ ID NO: 687, SEQ ID NO: 844, SEQ ID NO: 1001, SEQ ID NO: 1158, SEQ ID NO: 1315, and SEQ ID NO: 1472; SEQ ID NO: 688, SEQ ID NO: 845, SEQ ID NO: 1002, SEQ ID NO: 1159, SEQ ID NO: 1316, and SEQ ID NO: 1473; SEQ ID NO: 689, SEQ ID NO: 846, SEQ ID NO: 1003, SEQ ID NO: 1160, SEQ ID NO: 1317, and SEQ ID NO: 1474; SEQ ID NO: 690, SEQ ID NO: 847, SEQ ID NO: 1004, SEQ ID NO: 1161, SEQ ID NO: 1318, and SEQ ID NO: 1475; SEQ ID NO: 691, SEQ ID NO: 848, SEQ ID NO: 1005, SEQ ID NO: 1162, SEQ ID NO: 1319, and SEQ ID NO: 1476; SEQ ID NO: 692, SEQ ID NO: 849, SEQ ID NO: 1006, SEQ ID NO: 1163, SEQ ID NO: 1320, and SEQ ID NO: 1477; SEQ ID NO: 693, SEQ ID NO: 850, SEQ ID NO: 1007, SEQ ID NO: 1164, SEQ ID NO: 1321, and SEQ ID NO: 1478; SEQ ID NO: 694, SEQ ID NO: 851, SEQ ID NO: 1008, SEQ ID NO: 1165, SEQ ID NO: 1322, and SEQ ID NO: 1479; SEQ ID NO: 695, SEQ ID NO: 852, SEQ ID NO: 1009, SEQ ID NO: 1166, SEQ ID NO: 1323, and SEQ ID NO: 1480; SEQ ID NO: 696, SEQ ID NO: 853, SEQ ID NO: 1010, SEQ ID NO: 1167, SEQ ID NO: 1324, and SEQ ID NO: 1481; SEQ ID NO: 697, SEQ ID NO: 854, SEQ ID NO: 1011, SEQ ID NO: 1168, SEQ ID NO: 1325, and SEQ ID NO: 1482; SEQ ID NO: 698, SEQ ID NO: 855, SEQ ID NO: 1012, SEQ ID NO: 1169, SEQ ID NO: 1326, and SEQ ID NO: 1483; SEQ ID NO: 699, SEQ ID NO: 856, SEQ ID NO: 1013, SEQ ID NO: 1170, SEQ ID NO: 1327, and SEQ ID NO: 1484; SEQ ID NO: 700, SEQ ID NO: 857, SEQ ID NO: 1014, SEQ ID NO: 1171, SEQ ID NO: 1328, and SEQ ID NO: 1485; SEQ ID NO: 701, SEQ ID NO: 858, SEQ ID NO: 1015, SEQ ID NO: 1172, SEQ ID NO: 1329, and SEQ ID NO: 1486; SEQ ID NO: 702, SEQ ID NO: 859, SEQ ID NO: 1016, SEQ ID NO: 1173, SEQ ID NO: 1330, and SEQ ID NO: 1487; SEQ ID NO: 703, SEQ ID NO: 860, SEQ ID NO: 1017, SEQ ID NO: 1174, SEQ ID NO: 1331, and SEQ ID NO: 1488; SEQ ID NO: 704, SEQ ID NO: 861, SEQ ID NO: 1018, SEQ ID NO: 1175, SEQ ID NO: 1332, and SEQ ID NO: 1489; SEQ ID NO: 705, SEQ ID NO: 862, SEQ ID NO: 1019, SEQ ID NO: 1176, SEQ ID NO: 1333, and SEQ ID NO: 1490; SEQ ID NO: 706, SEQ ID NO: 863, SEQ ID NO: 1020, SEQ ID NO: 1177, SEQ ID NO: 1334, and SEQ ID NO: 1491; SEQ ID NO: 707, SEQ ID NO: 864, SEQ ID NO: 1021, SEQ ID NO: 1178, SEQ ID NO: 1335, and SEQ ID NO: 1492; SEQ ID NO: 708, SEQ ID NO: 865, SEQ ID NO: 1022, SEQ ID NO: 1179, SEQ ID NO: 1336, and SEQ ID NO: 1493; SEQ ID NO: 709, SEQ ID NO: 866, SEQ ID NO: 1023, SEQ ID NO: 1180, SEQ ID NO: 1337, and SEQ ID NO: 1494; SEQ ID NO: 710, SEQ ID NO: 867, SEQ ID NO: 1024, SEQ ID NO: 1181, SEQ ID NO: 1338, and SEQ ID NO: 1495; SEQ ID NO: 711, SEQ ID NO: 868, SEQ ID NO: 1025, SEQ ID NO: 1182, SEQ ID NO: 1339, and SEQ ID NO: 1496; SEQ ID NO: 712, SEQ ID NO: 869, SEQ ID NO: 1026, SEQ ID NO: 1183, SEQ ID NO: 1340, and SEQ ID NO: 1497; SEQ ID NO: 713, SEQ ID NO: 870, SEQ ID NO: 1027, SEQ ID NO: 1184, SEQ ID NO: 1341, and SEQ ID NO: 1498; SEQ ID NO: 714, SEQ ID NO: 871, SEQ ID NO: 1028, SEQ ID NO: 1185, SEQ ID NO: 1342, and SEQ ID NO: 1499; SEQ ID NO: 715, SEQ ID NO: 872, SEQ ID NO: 1029, SEQ ID NO: 1186, SEQ ID NO: 1343, and SEQ ID NO: 1500; SEQ ID NO: 716, SEQ ID NO: 873, SEQ ID NO: 1030, SEQ ID NO: 1187, SEQ ID NO: 1344, and SEQ ID NO: 1501; SEQ ID NO: 717, SEQ ID NO: 874, SEQ ID NO: 1031, SEQ ID NO: 1188, SEQ ID NO: 1345, and SEQ ID NO: 1502; SEQ ID NO: 718, SEQ ID NO: 875, SEQ ID NO: 1032, SEQ ID NO: 1189, SEQ ID NO: 1346, and SEQ ID NO: 1503; SEQ ID NO: 719, SEQ ID NO: 876, SEQ ID NO: 1033, SEQ ID NO: 1190, SEQ ID NO: 1347, and SEQ ID NO: 1504; SEQ ID NO: 720, SEQ ID NO: 877, SEQ ID NO: 1034, SEQ ID NO: 1191, SEQ ID NO: 1348, and SEQ ID NO: 1505; SEQ ID NO: 721, SEQ ID NO: 878, SEQ ID NO: 1035, SEQ ID NO: 1192, SEQ ID NO: 1349, and SEQ ID NO: 1506; SEQ ID NO: 722, SEQ ID NO: 879, SEQ ID NO: 1036, SEQ ID NO: 1193, SEQ ID NO: 1350, and SEQ ID NO: 1507; SEQ ID NO: 723, SEQ ID NO: 880, SEQ ID NO: 1037, SEQ ID NO: 1194, SEQ ID NO: 1351, and SEQ ID NO: 1508; SEQ ID NO: 724, SEQ ID NO: 881, SEQ ID NO: 1038, SEQ ID NO: 1195, SEQ ID NO: 1352, and SEQ ID NO: 1509; SEQ ID NO: 725, SEQ ID NO: 882, SEQ ID NO: 1039, SEQ ID NO: 1196, SEQ ID NO: 1353, and SEQ ID NO: 1510; SEQ ID NO: 726, SEQ ID NO: 883, SEQ ID NO: 1040, SEQ ID NO: 1197, SEQ ID NO: 1354, and SEQ ID NO: 1511; SEQ ID NO: 727, SEQ ID NO: 884, SEQ ID NO: 1041, SEQ ID NO: 1198, SEQ ID NO: 1355, and SEQ ID NO: 1512; SEQ ID NO: 728, SEQ ID NO: 885, SEQ ID NO: 1042, SEQ ID NO: 1199, SEQ ID NO: 1356, and SEQ ID NO: 1513; SEQ ID NO: 729, SEQ ID NO: 886, SEQ ID NO: 1043, SEQ ID NO: 1200, SEQ ID NO: 1357, and SEQ ID NO: 1514; SEQ ID NO: 730, SEQ ID NO: 887, SEQ ID NO: 1044, SEQ ID NO: 1201, SEQ ID NO: 1358, and SEQ ID NO: 1515; SEQ ID NO: 731, SEQ ID NO: 888, SEQ ID NO: 1045, SEQ ID NO: 1202, SEQ ID NO: 1359, and SEQ ID NO: 1516; SEQ ID NO: 732, SEQ ID NO: 889, SEQ ID NO: 1046, SEQ ID NO: 1203, SEQ ID NO: 1360, and SEQ ID NO: 1517; SEQ ID NO: 733, SEQ ID NO: 890, SEQ ID NO: 1047, SEQ ID NO: 1204, SEQ ID NO: 1361, and SEQ ID NO: 1518; SEQ ID NO: 734, SEQ ID NO: 891, SEQ ID NO: 1048, SEQ ID NO: 1205, SEQ ID NO: 1362, and SEQ ID NO: 1519; SEQ ID NO: 735, SEQ ID NO: 892, SEQ ID NO: 1049, SEQ ID NO: 1206, SEQ ID NO: 1363, and SEQ ID NO: 1520; SEQ ID NO: 736, SEQ ID NO: 893, SEQ ID NO: 1050, SEQ ID NO: 1207, SEQ ID NO: 1364, and SEQ ID NO: 1521; SEQ ID NO: 737, SEQ ID NO: 894, SEQ ID NO: 1051, SEQ ID NO: 1208, SEQ ID NO: 1365, and SEQ ID NO: 1522; SEQ ID NO: 738, SEQ ID NO: 895, SEQ ID NO: 1052, SEQ ID NO: 1209, SEQ ID NO: 1366, and SEQ ID NO: 1523; SEQ ID NO: 739, SEQ ID NO: 896, SEQ ID NO: 1053, SEQ ID NO: 1210, SEQ ID NO: 1367, and SEQ ID NO: 1524; SEQ ID NO: 740, SEQ ID NO: 897, SEQ ID NO: 1054, SEQ ID NO: 1211, SEQ ID NO: 1368, and SEQ ID NO: 1525; SEQ ID NO: 741, SEQ ID NO: 898, SEQ ID NO: 1055, SEQ ID NO: 1212, SEQ ID NO: 1369, and SEQ ID NO: 1526; SEQ ID NO: 742, SEQ ID NO: 899, SEQ ID NO: 1056, SEQ ID NO: 1213, SEQ ID NO: 1370, and SEQ ID NO: 1527; SEQ ID NO: 743, SEQ ID NO: 900, SEQ ID NO: 1057, SEQ ID NO: 1214, SEQ ID NO: 1371, and SEQ ID NO: 1528; SEQ ID NO: 744, SEQ ID NO: 901, SEQ ID NO: 1058, SEQ ID NO: 1215, SEQ ID NO: 1372, and SEQ ID NO: 1529; SEQ ID NO: 745, SEQ ID NO: 902, SEQ ID NO: 1059, SEQ ID NO: 1216, SEQ ID NO: 1373, and SEQ ID NO: 1530; SEQ ID NO: 746, SEQ ID NO: 903, SEQ ID NO: 1060, SEQ ID NO: 1217, SEQ ID NO: 1374, and SEQ ID NO: 1531; SEQ ID NO: 747, SEQ ID NO: 904, SEQ ID NO: 1061, SEQ ID NO: 1218, SEQ ID NO: 1375, and SEQ ID NO: 1532; SEQ ID NO: 748, SEQ ID NO: 905, SEQ ID NO: 1062, SEQ ID NO: 1219, SEQ ID NO: 1376, and SEQ ID NO: 1533; SEQ ID NO: 749, SEQ ID NO: 906, SEQ ID NO: 1063, SEQ ID NO: 1220, SEQ ID NO: 1377, and SEQ ID NO: 1534; SEQ ID NO: 750, SEQ ID NO: 907, SEQ ID NO: 1064, SEQ ID NO: 1221, SEQ ID NO: 1378, and SEQ ID NO: 1535; SEQ ID NO: 751, SEQ ID NO: 908, SEQ ID NO: 1065, SEQ ID NO: 1222, SEQ ID NO: 1379, and SEQ ID NO: 1536; SEQ ID NO: 752, SEQ ID NO: 909, SEQ ID NO: 1066, SEQ ID NO: 1223, SEQ ID NO: 1380, and SEQ ID NO: 1537; SEQ ID NO: 753, SEQ ID NO: 910, SEQ ID NO: 1067, SEQ ID NO: 1224, SEQ ID NO: 1381, and SEQ ID NO: 1538; SEQ ID NO: 754, SEQ ID NO: 911, SEQ ID NO: 1068, SEQ ID NO: 1225, SEQ ID NO: 1382, and SEQ ID NO: 1539; SEQ ID NO: 755, SEQ ID NO: 912, SEQ ID NO: 1069, SEQ ID NO: 1226, SEQ ID NO: 1383, and SEQ ID NO: 1540; SEQ ID NO: 756, SEQ ID NO: 913, SEQ ID NO: 1070, SEQ ID NO: 1227, SEQ ID NO: 1384, and SEQ ID NO: 1541; SEQ ID NO: 757, SEQ ID NO: 914, SEQ ID NO: 1071, SEQ ID NO: 1228, SEQ ID NO: 1385, and SEQ ID NO: 1542; SEQ ID NO: 758, SEQ ID NO: 915, SEQ ID NO: 1072, SEQ ID NO: 1229, SEQ ID NO: 1386, and SEQ ID NO: 1543; SEQ ID NO: 759, SEQ ID NO: 916, SEQ ID NO: 1073, SEQ ID NO: 1230, SEQ ID NO: 1387, and SEQ ID NO: 1544; SEQ ID NO: 760, SEQ ID NO: 917, SEQ ID NO: 1074, SEQ ID NO: 1231, SEQ ID NO: 1388, and SEQ ID NO: 1545; SEQ ID NO: 761, SEQ ID NO: 918, SEQ ID NO: 1075, SEQ ID NO: 1232, SEQ ID NO: 1389, and SEQ ID NO: 1546; SEQ ID NO: 762, SEQ ID NO: 919, SEQ ID NO: 1076, SEQ ID NO: 1233, SEQ ID NO: 1390, and SEQ ID NO: 1547; SEQ ID NO: 763, SEQ ID NO: 920, SEQ ID NO: 1077, SEQ ID NO: 1234, SEQ ID NO: 1391, and SEQ ID NO: 1548; SEQ ID NO: 764, SEQ ID NO: 921, SEQ ID NO: 1078, SEQ ID NO: 1235, SEQ ID NO: 1392, and SEQ ID NO: 1549; SEQ ID NO: 765, SEQ ID NO: 922, SEQ ID NO: 1079, SEQ ID NO: 1236, SEQ ID NO: 1393, and SEQ ID NO: 1550; SEQ ID NO: 766, SEQ ID NO: 923, SEQ ID NO: 1080, SEQ ID NO: 1237, SEQ ID NO: 1394, and SEQ ID NO: 1551; SEQ ID NO: 767, SEQ ID NO: 924, SEQ ID NO: 1081, SEQ ID NO: 1238, SEQ ID NO: 1395, and SEQ ID NO: 1552; SEQ ID NO: 768, SEQ ID NO: 925, SEQ ID NO: 1082, SEQ ID NO: 1239, SEQ ID NO: 1396, and SEQ ID NO: 1553; SEQ ID NO: 769, SEQ ID NO: 926, SEQ ID NO: 1083, SEQ ID NO: 1240, SEQ ID NO: 1397, and SEQ ID NO: 1554; SEQ ID NO: 770, SEQ ID NO: 927, SEQ ID NO: 1084, SEQ ID NO: 1241, SEQ ID NO: 1398, and SEQ ID NO: 1555; SEQ ID NO: 771, SEQ ID NO: 928, SEQ ID NO: 1085, SEQ ID NO: 1242, SEQ ID NO: 1399, and SEQ ID NO: 1556; SEQ ID NO: 772, SEQ ID NO: 929, SEQ ID NO: 1086, SEQ ID NO: 1243, SEQ ID NO: 1400, and SEQ ID NO: 1557; SEQ ID NO: 773, SEQ ID NO: 930, SEQ ID NO: 1087, SEQ ID NO: 1244, SEQ ID NO: 1401, and SEQ ID NO: 1558; SEQ ID NO: 774, SEQ ID NO: 931, SEQ ID NO: 1088, SEQ ID NO: 1245, SEQ ID NO: 1402, and SEQ ID NO: 1559; SEQ ID NO: 775, SEQ ID NO: 932, SEQ ID NO: 1089, SEQ ID NO: 1246, SEQ ID NO: 1403, and SEQ ID NO: 1560; SEQ ID NO: 776, SEQ ID NO: 933, SEQ ID NO: 1090, SEQ ID NO: 1247, SEQ ID NO: 1404, and SEQ ID NO: 1561; SEQ ID NO: 777, SEQ ID NO: 934, SEQ ID NO: 1091, SEQ ID NO: 1248, SEQ ID NO: 1405, and SEQ ID NO: 1562; SEQ ID NO: 778, SEQ ID NO: 935, SEQ ID NO: 1092, SEQ ID NO: 1249, SEQ ID NO: 1406, and SEQ ID NO: 1563; SEQ ID NO: 779, SEQ ID NO: 936, SEQ ID NO: 1093, SEQ ID NO: 1250, SEQ ID NO: 1407, and SEQ ID NO: 1564; SEQ ID NO: 780, SEQ ID NO: 937, SEQ ID NO: 1094, SEQ ID NO: 1251, SEQ ID NO: 1408, and SEQ ID NO: 1565; SEQ ID NO: 781, SEQ ID NO: 938, SEQ ID NO: 1095, SEQ ID NO: 1252, SEQ ID NO: 1409, and SEQ ID NO: 1566; SEQ ID NO: 782, SEQ ID NO: 939, SEQ ID NO: 1096, SEQ ID NO: 1253, SEQ ID NO: 1410, and SEQ ID NO: 1567; SEQ ID NO: 783, SEQ ID NO: 940, SEQ ID NO: 1097, SEQ ID NO: 1254, SEQ ID NO: 1411, and SEQ ID NO: 1568; SEQ ID NO: 784, SEQ ID NO: 941, SEQ ID NO: 1098, SEQ ID NO: 1255, SEQ ID NO: 1412, and SEQ ID NO: 1569; and SEQ ID NO: 785, SEQ ID NO: 942, SEQ ID NO: 1099, SEQ ID NO: 1256, SEQ ID NO: 1413, and SEQ ID NO: 1570, wherein
[0239] the antibody or functional fragment thereof comprises a cysteine or non-canonical amino acid amino acid substitution at one or more conjugation site(s) selected from the group consisting of
[0240] D70 of the antibody light chain relative to reference sequence SEQ ID NO: 455,
[0241] E276 of the antibody heavy chain relative to reference sequence SEQ ID NO: 612, and
[0242] T363 of the antibody heavy chain relative to reference sequence SEQ ID NO: 612.

[0243] In one embodiment, the antibody comprises a light chain variable region comprising a sequence selected from the group consisting of SEQ ID NOs: 1-157 and a heavy chain variable region comprising a sequence selected from the group consisting of SEQ ID NOs: 158-314, wherein
[0244] the antibody or functional fragment thereof comprises a cysteine or non-canonical amino acid amino acid substitution at one or more conjugation site(s) selected from the group consisting of
[0245] D70 of the antibody light chain relative to reference sequence SEQ ID NO: 455,
[0246] E276 of the antibody heavy chain relative to reference sequence SEQ ID NO: 612, and
[0247] T363 of the antibody heavy chain relative to reference sequence SEQ ID NO: 612.

[0248] In one embodiment, the antibody comprises a combination of a light chain variable region and a heavy chain variable region selected from the group consisting of a light chain variable region comprising SEQ ID NO: 1 and a heavy chain variable region comprising SEQ ID NO: 158; a light chain variable region comprising SEQ ID NO: 2 and a heavy chain variable region comprising SEQ ID NO: 159; a light chain variable region comprising SEQ ID NO: 3 and a heavy chain variable region comprising SEQ ID NO: 160; a light chain variable region comprising SEQ ID NO: 4 and a heavy chain variable region comprising SEQ ID NO: 161; a light chain variable region comprising SEQ ID NO: 5 and a heavy chain variable region comprising SEQ ID NO: 162; a light chain variable region comprising SEQ ID NO: 6 and a heavy chain variable region comprising SEQ ID NO: 163; a light chain variable region comprising SEQ ID NO: 7 and a heavy chain variable region comprising SEQ ID NO: 164; a light chain variable region comprising SEQ ID NO: 8 and a heavy chain variable region comprising SEQ ID NO: 165; a light chain variable region comprising SEQ ID NO: 9 and a heavy chain variable region comprising SEQ ID NO: 166; a light chain variable region comprising SEQ ID NO: 10 and a heavy chain variable region comprising SEQ ID NO: 167; a light chain variable region comprising SEQ ID NO: 11 and a heavy chain variable region comprising SEQ ID NO: 168; a light chain variable region comprising SEQ ID NO: 12 and a heavy chain variable region comprising SEQ ID NO: 169; a light chain variable region comprising SEQ ID NO: 13 and a heavy chain variable region comprising SEQ ID NO: 170; a light chain variable region comprising SEQ ID NO: 14 and a heavy chain variable region comprising SEQ ID NO: 171; a light chain variable region comprising SEQ ID NO: 15 and a heavy chain variable region comprising SEQ ID NO: 172; a light chain variable region comprising SEQ ID NO: 16 and a heavy chain variable region comprising SEQ ID NO: 173; a light chain variable region comprising SEQ ID NO: 17 and a heavy chain variable region comprising SEQ ID NO: 174; a light chain variable region comprising SEQ ID NO: 18 and a heavy chain variable region comprising SEQ ID NO: 175; a light chain variable region comprising SEQ ID NO: 19 and a heavy chain variable region comprising SEQ ID NO: 176; a light chain variable region comprising SEQ ID NO: 20 and a heavy chain variable region comprising SEQ ID NO: 177; a light chain variable region comprising SEQ ID NO: 21 and a heavy chain variable region comprising SEQ ID NO: 178; a light chain variable region comprising SEQ ID NO: 22 and a heavy chain variable region comprising SEQ ID NO: 179; a light chain variable region comprising SEQ ID NO: 23 and a heavy chain variable region comprising SEQ ID NO: 180; a light chain variable region comprising SEQ ID NO: 24 and a heavy chain variable region comprising SEQ ID NO: 181; a light chain variable region comprising SEQ ID NO: 25 and a heavy chain variable region comprising SEQ ID NO: 182; a light chain variable region comprising SEQ ID NO: 26 and a heavy chain variable region comprising SEQ ID NO: 183; a light chain variable region comprising SEQ ID NO: 27 and a heavy chain variable region comprising SEQ ID NO: 184; a light chain variable region comprising SEQ ID NO: 28 and a heavy chain variable region comprising SEQ ID NO: 185; a light chain variable region comprising SEQ ID NO: 29 and a heavy chain variable region comprising SEQ ID NO: 186; a light chain variable region comprising SEQ ID NO: 30 and a heavy chain variable region comprising SEQ ID NO: 187; a light chain variable region comprising SEQ ID NO: 31 and a heavy chain variable region comprising SEQ ID NO: 188; a light chain variable region comprising SEQ ID NO: 32 and a heavy chain variable region comprising SEQ ID NO: 189; a light chain variable region comprising SEQ ID NO: 33 and a heavy chain variable region comprising SEQ ID NO: 190; a light chain variable region comprising SEQ ID NO: 34 and a heavy chain variable region comprising SEQ ID NO: 191; a light chain variable region comprising SEQ ID NO: 35 and a heavy chain variable region comprising SEQ ID NO: 192; a light chain variable region comprising SEQ ID NO: 36 and a heavy chain variable region comprising SEQ ID NO: 193; a light chain variable region comprising SEQ ID NO: 37 and a heavy chain variable region comprising SEQ ID NO: 194; a light chain variable region comprising SEQ ID NO: 38 and a heavy chain variable region comprising SEQ ID NO: 195; a light chain variable region comprising SEQ ID NO: 39 and a heavy chain variable region comprising SEQ ID NO: 1%; a light chain variable region comprising SEQ ID NO: 40 and a heavy chain variable region comprising SEQ ID NO: 197; a light chain variable region comprising SEQ ID NO: 41 and a heavy chain variable region comprising SEQ ID NO: 198; a light chain variable region comprising SEQ ID NO: 42 and a heavy chain variable region comprising SEQ ID NO: 199; a light chain variable region comprising SEQ ID NO: 43 and a heavy chain variable region comprising SEQ ID NO: 200; a light chain variable region comprising SEQ ID NO: 44 and a heavy chain variable region comprising SEQ ID NO: 201; a light chain variable region comprising SEQ ID NO: 45 and a heavy chain variable region comprising SEQ ID NO: 202; a light chain variable region comprising SEQ ID NO: 46 and a heavy chain variable region comprising SEQ ID NO: 203; a light chain variable region comprising SEQ ID NO: 47 and a heavy chain variable region comprising SEQ ID NO: 204; a light chain variable region comprising SEQ ID NO: 48 and a heavy chain variable region comprising SEQ ID NO: 205; a light chain variable region comprising SEQ ID NO: 49 and a heavy chain variable region comprising SEQ ID NO: 206; a light chain variable region comprising SEQ ID NO: 50 and a heavy chain variable region comprising SEQ ID NO: 207; a light chain variable region comprising SEQ ID NO: 51 and a heavy chain variable region comprising SEQ ID NO: 208; a light chain variable region comprising SEQ ID NO: 52 and a heavy chain variable region comprising SEQ ID NO: 209; a light chain variable region comprising SEQ ID NO: 53 and a heavy chain variable region comprising SEQ ID NO: 210; a light chain variable region comprising SEQ ID NO: 54 and a heavy chain variable region comprising SEQ ID NO: 211; a light chain variable region comprising SEQ ID NO: 55 and a heavy chain variable region comprising SEQ ID NO: 212; a light chain variable region comprising SEQ ID NO: 56 and a heavy chain variable region comprising SEQ ID NO: 213; a light chain variable region comprising SEQ ID NO: 57 and a heavy chain variable region comprising SEQ ID NO: 214; a light chain variable region comprising SEQ ID NO: 58 and a heavy chain variable region comprising SEQ ID NO: 215; a light chain variable region comprising SEQ ID NO: 59 and a heavy chain variable region comprising SEQ ID NO: 216; a light chain variable region comprising SEQ ID NO: 60 and a heavy chain variable region comprising SEQ ID NO: 217; a light chain variable region comprising SEQ ID NO: 61 and a heavy chain variable region comprising SEQ ID NO: 218; a light chain variable region comprising SEQ ID NO: 62 and a heavy chain variable region comprising SEQ ID NO: 219; a light chain variable region comprising SEQ ID NO: 63 and a heavy chain variable region comprising SEQ ID NO: 220; a light chain variable region comprising SEQ ID NO: 64 and a heavy chain variable region comprising SEQ ID NO: 221; a light chain variable region comprising SEQ ID NO: 65 and a heavy chain variable region comprising SEQ ID NO: 222; a light chain variable region comprising SEQ ID NO: 66 and a heavy chain variable region comprising SEQ ID NO: 223; a light chain variable region comprising SEQ ID NO: 67 and a heavy chain variable region comprising SEQ ID NO: 224; a light chain variable region comprising SEQ ID NO: 68 and a heavy chain variable region comprising SEQ ID NO: 225; a light chain variable region comprising SEQ ID NO: 69 and a heavy chain variable region comprising SEQ ID NO: 226; a light chain variable region comprising SEQ ID NO: 70 and a heavy chain variable region comprising SEQ ID NO: 227; a light chain variable region comprising SEQ ID NO: 71 and a heavy chain variable region comprising SEQ ID NO: 228; a light chain variable region comprising SEQ ID NO: 72 and a heavy chain variable region comprising SEQ ID NO: 229; a light chain variable region comprising SEQ ID NO: 73 and a heavy chain variable region comprising SEQ ID NO: 230; a light chain variable region comprising SEQ ID NO: 74 and a heavy chain variable region comprising SEQ ID NO: 231; a light chain variable region comprising SEQ ID NO: 75 and a heavy chain variable region comprising SEQ ID NO: 232; a light chain variable region comprising SEQ ID NO: 76 and a heavy chain variable region comprising SEQ ID NO: 233; a light chain variable region comprising SEQ ID NO: 77 and a heavy chain variable region comprising SEQ ID NO: 234; a light chain variable region comprising SEQ ID NO: 78 and a heavy chain variable region comprising SEQ ID NO: 235; a light chain variable region comprising SEQ ID NO: 79 and a heavy chain variable region comprising SEQ ID NO: 236; a light chain variable region comprising SEQ ID NO: 80 and a heavy chain variable region comprising SEQ ID NO: 237; a light chain variable region comprising SEQ ID NO: 81 and a heavy chain variable region comprising SEQ ID NO: 238; a light chain variable region comprising SEQ ID NO: 82 and a heavy chain variable region comprising SEQ ID NO: 239; a light chain variable region comprising SEQ ID NO: 83 and a heavy chain variable region comprising SEQ ID NO: 240; a light chain variable region comprising SEQ ID NO: 84 and a heavy chain variable region comprising SEQ ID NO: 241; a light chain variable region comprising SEQ ID NO: 85 and a heavy chain variable region comprising SEQ ID NO: 242; a light chain variable region comprising SEQ ID NO: 86 and a heavy chain variable region comprising SEQ ID NO: 243; a light chain variable region comprising SEQ ID NO: 87 and a heavy chain variable region comprising SEQ ID NO: 244; a light chain variable region comprising SEQ ID NO: 88 and a heavy chain variable region comprising SEQ ID NO: 245; a light chain variable region comprising SEQ ID NO: 89 and a heavy chain variable region comprising SEQ ID NO: 246; a light chain variable region comprising SEQ ID NO: 90 and a heavy chain variable region comprising SEQ ID NO: 247; a light chain variable region comprising SEQ ID NO: 91 and a heavy chain variable region comprising SEQ ID NO: 248; a light chain variable region comprising SEQ ID NO: 92 and a heavy chain variable region comprising SEQ ID NO: 249; a light chain variable region comprising SEQ ID NO: 93 and a heavy chain variable region comprising SEQ ID NO: 250; a light chain variable region comprising SEQ ID NO: 94 and a heavy chain variable region comprising SEQ ID NO: 251; a light chain variable region comprising SEQ ID NO: 95 and a heavy chain variable region comprising SEQ ID NO: 252; a light chain variable region comprising SEQ ID NO: 96 and a heavy chain variable region comprising SEQ ID NO: 253; a light chain variable region comprising SEQ ID NO: 97 and a heavy chain variable region comprising SEQ ID NO: 254; a light chain variable region comprising SEQ ID NO: 98 and a heavy chain variable region comprising SEQ ID NO: 255; a light chain variable region comprising SEQ ID NO: 99 and a heavy chain variable region comprising SEQ ID NO: 256; a light chain variable region comprising SEQ ID NO: 100 and a heavy chain variable region comprising SEQ ID NO: 257; a light chain variable region comprising SEQ ID NO: 101 and a heavy chain variable region comprising SEQ ID NO: 258; a light chain variable region comprising SEQ ID NO: 102 and a heavy chain variable region comprising SEQ ID NO: 259; a light chain variable region comprising SEQ ID NO: 103 and a heavy chain variable region comprising SEQ ID NO: 260; a light chain variable region comprising SEQ ID NO: 104 and a heavy chain variable region comprising SEQ ID NO: 261; a light chain variable region comprising SEQ ID NO: 105 and a heavy chain variable region comprising SEQ ID NO: 262; a light chain variable region comprising SEQ ID NO: 106 and a heavy chain variable region comprising SEQ ID NO: 263; a light chain variable region comprising SEQ ID NO: 107 and a heavy chain variable region comprising SEQ ID NO: 264; a light chain variable region comprising SEQ ID NO: 108 and a heavy chain variable region comprising SEQ ID NO: 265; a light chain variable region comprising SEQ ID NO: 109 and a heavy chain variable region comprising SEQ ID NO: 266; a light chain variable region comprising SEQ ID NO: 110 and a heavy chain variable region comprising SEQ ID NO: 267; a light chain variable region comprising SEQ ID NO: 111 and a heavy chain variable region comprising SEQ ID NO: 268; a light chain variable region comprising SEQ ID NO: 112 and a heavy chain variable region comprising SEQ ID NO: 269; a light chain variable region comprising SEQ ID NO: 113 and a heavy chain variable region comprising SEQ ID NO: 270; a light chain variable region comprising SEQ ID NO: 114 and a heavy chain variable region comprising SEQ ID NO: 271; a light chain variable region comprising SEQ ID NO: 115 and a heavy chain variable region comprising SEQ ID NO: 272; a light chain variable region comprising SEQ ID NO: 116 and a heavy chain variable region comprising SEQ ID NO: 273; a light chain variable region comprising SEQ ID NO: 117 and a heavy chain variable region comprising SEQ ID NO: 274; a light chain variable region comprising SEQ ID NO: 118 and a heavy chain variable region comprising SEQ ID NO: 275; a light chain variable region comprising SEQ ID NO: 119 and a heavy chain variable region comprising SEQ ID NO: 276; a light chain variable region comprising SEQ ID NO: 120 and a heavy chain variable region comprising SEQ ID NO: 277; a light chain variable region comprising SEQ ID NO: 121 and a heavy chain variable region comprising SEQ ID NO: 278; a light chain variable region comprising SEQ ID NO: 122 and a heavy chain variable region comprising SEQ ID NO: 279; a light chain variable region comprising SEQ ID NO: 123 and a heavy chain variable region comprising SEQ ID NO: 280; a light chain variable region comprising SEQ ID NO: 124 and a heavy chain variable region comprising SEQ ID NO: 281; a light chain variable region comprising SEQ ID NO: 125 and a heavy chain variable region comprising SEQ ID NO: 282; a light chain variable region comprising SEQ ID NO: 126 and a heavy chain variable region comprising SEQ ID NO: 283; a light chain variable region comprising SEQ ID NO: 127 and a heavy chain variable region comprising SEQ ID NO: 284; a light chain variable region comprising SEQ ID NO: 128 and a heavy chain variable region comprising SEQ ID NO: 285; a light chain variable region comprising SEQ ID NO: 129 and a heavy chain variable region comprising SEQ ID NO: 286; a light chain variable region comprising SEQ ID NO: 130 and a heavy chain variable region comprising SEQ ID NO: 287; a light chain variable region comprising SEQ ID NO: 131 and a heavy chain variable region comprising SEQ ID NO: 288; a light chain variable region comprising SEQ ID NO: 132 and a heavy chain variable region comprising SEQ ID NO: 289; a light chain variable region comprising SEQ ID NO: 133 and a heavy chain variable region comprising SEQ ID NO: 290; a light chain variable region comprising SEQ ID NO: 134 and a heavy chain variable region comprising SEQ ID NO: 291; a light chain variable region comprising SEQ ID NO: 135 and a heavy chain variable region comprising SEQ ID NO: 292; a light chain variable region comprising SEQ ID NO: 136 and a heavy chain variable region comprising SEQ ID NO: 293; a light chain variable region comprising SEQ ID NO: 137 and a heavy chain variable region comprising SEQ ID NO: 294; a light chain variable region comprising SEQ ID NO: 138 and a heavy chain variable region comprising SEQ ID NO: 295; a light chain variable region comprising SEQ ID NO: 139 and a heavy chain variable region comprising SEQ ID NO: 296; a light chain variable region comprising SEQ ID NO: 140 and a heavy chain variable region comprising SEQ ID NO: 297; a light chain variable region comprising SEQ ID NO: 141 and a heavy chain variable region comprising SEQ ID NO: 298; a light chain variable region comprising SEQ ID NO: 142 and a heavy chain variable region comprising SEQ ID NO: 299; a light chain variable region comprising SEQ ID NO: 143 and a heavy chain variable region comprising SEQ ID NO: 300; a light chain variable region comprising SEQ ID NO: 144 and a heavy chain variable region comprising SEQ ID NO: 301; a light chain variable region comprising SEQ ID NO: 145 and a heavy chain variable region comprising SEQ ID NO: 302; a light chain variable region comprising SEQ ID NO: 146 and a heavy chain variable region comprising SEQ ID NO: 303; a light chain variable region comprising SEQ ID NO: 147 and a heavy chain variable region comprising SEQ ID NO: 304; a light chain variable region comprising SEQ ID NO: 148 and a heavy chain variable region comprising SEQ ID NO: 305; a light chain variable region comprising SEQ ID NO: 149 and a heavy chain variable region comprising SEQ ID NO: 306; a light chain variable region comprising SEQ ID NO: 150 and a heavy chain variable region comprising SEQ ID NO: 307; a light chain variable region comprising SEQ ID NO: 151 and a heavy chain variable region comprising SEQ ID NO: 308; a light chain variable region comprising SEQ ID NO: 152 and a heavy chain variable region comprising SEQ ID NO: 309; a light chain variable region comprising SEQ ID NO: 153 and a heavy chain variable region comprising SEQ ID NO: 310; a light chain variable region comprising SEQ ID NO: 154 and a heavy chain variable region comprising SEQ ID NO: 311; a light chain variable region comprising SEQ ID NO: 155 and a heavy chain variable region comprising SEQ ID NO: 312; a light chain variable region comprising SEQ ID NO: 156 and a heavy chain variable region comprising SEQ ID NO: 313; and a light chain variable region comprising SEQ ID NO: 157 and a heavy chain variable region comprising SEQ ID NO: 314, wherein
[0249] the antibody or functional fragment thereof comprises a cysteine or non-canonical amino acid amino acid substitution at one or more conjugation site(s) selected from the group consisting of
[0250] D70 of the antibody light chain relative to reference sequence SEQ ID NO: 455,
[0251] E276 of the antibody heavy chain relative to reference sequence SEQ ID NO: 612, and
[0252] T363 of the antibody heavy chain relative to reference sequence SEQ ID NO: 612.

[0253] In one embodiment, the antibody comprises a light chain comprising a sequence selected from the group consisting of SEQ ID NOs: 315-471 and a heavy chain comprising a sequence selected from the group consisting of SEQ ID NOs: 472-628, wherein
[0254] the antibody or functional fragment thereof comprises a cysteine or non-canonical amino acid amino acid substitution at one or more conjugation site(s) selected from the group consisting of
[0255] D70 of the antibody light chain relative to reference sequence SEQ ID NO: 455,
[0256] E276 of the antibody heavy chain relative to reference sequence SEQ ID NO: 612, and
[0257] T363 of the antibody heavy chain relative to reference sequence SEQ ID NO: 612.

[0258] In one embodiment, the antibody comprises a combination of a light chain and a heavy chain selected from the group consisting of a light chain comprising SEQ ID NO: 315 and a heavy chain comprising SEQ ID NO: 472; a light chain comprising SEQ ID NO: 316 and a heavy chain comprising SEQ ID NO: 473; a light chain comprising SEQ ID NO: 317 and a heavy chain comprising SEQ ID NO: 474; a light chain comprising SEQ ID NO: 318 and a heavy chain comprising SEQ ID NO: 475; a light chain comprising SEQ ID NO: 319 and a heavy chain comprising SEQ ID NO: 476; a light chain comprising SEQ ID NO: 320 and a heavy chain comprising SEQ ID NO: 477; a light chain comprising SEQ ID NO: 321 and a heavy chain comprising SEQ ID NO: 478; a light chain comprising SEQ ID NO: 322 and a heavy chain comprising SEQ ID NO: 479; a light chain comprising SEQ ID NO: 323 and a heavy chain comprising SEQ ID NO: 480; a light chain comprising SEQ ID NO: 324 and a heavy chain comprising SEQ ID NO: 481; a light chain comprising SEQ ID NO: 325 and a heavy chain comprising SEQ ID NO: 482; a light chain comprising SEQ ID NO: 326 and a heavy chain comprising SEQ ID NO: 483; a light chain comprising SEQ ID NO: 327 and a heavy chain comprising SEQ ID NO: 484; a light chain comprising SEQ ID NO: 328 and a heavy chain comprising SEQ ID NO: 485; a light chain comprising SEQ ID NO: 329 and a heavy chain comprising SEQ ID NO: 486; a light chain comprising SEQ ID NO: 330 and a heavy chain comprising SEQ ID NO: 487; a light chain comprising SEQ ID NO: 331 and a heavy chain comprising SEQ ID NO: 488; a light chain comprising SEQ ID NO: 332 and a heavy chain comprising SEQ ID NO: 489; a light chain comprising SEQ ID NO: 333 and a heavy chain comprising SEQ ID NO: 490; a light chain comprising SEQ ID NO: 334 and a heavy chain comprising SEQ ID NO: 491; a light chain comprising SEQ ID NO: 335 and a heavy chain comprising SEQ ID NO: 492; a light chain comprising SEQ ID NO: 336 and a heavy chain comprising SEQ ID NO: 493; a light chain comprising SEQ ID NO: 337 and a heavy chain comprising SEQ ID NO: 494; a light chain comprising SEQ ID NO: 338 and a heavy chain comprising SEQ ID NO: 495; a light chain comprising SEQ ID NO: 339 and a heavy chain comprising SEQ ID NO: 496; a light chain comprising SEQ ID NO: 340 and a heavy chain comprising SEQ ID NO: 497; a light chain comprising SEQ ID NO: 341 and a heavy chain comprising SEQ ID NO: 498; a light chain comprising SEQ ID NO: 342 and a heavy chain comprising SEQ ID NO: 499; a light chain comprising SEQ ID NO: 343 and a heavy chain comprising SEQ ID NO: 500; a light chain comprising SEQ ID NO: 344 and a heavy chain comprising SEQ ID NO: 501; a light chain comprising SEQ ID NO: 345 and a heavy chain comprising SEQ ID NO: 502; a light chain comprising SEQ ID NO: 346 and a heavy chain comprising SEQ ID NO: 503; a light chain comprising SEQ ID NO: 347 and a heavy chain comprising SEQ ID NO: 504; a light chain comprising SEQ ID NO: 348 and a heavy chain comprising SEQ ID NO: 505; a light chain comprising SEQ ID NO: 349 and a heavy chain comprising SEQ ID NO: 506; a light chain comprising SEQ ID NO: 350 and a heavy chain comprising SEQ ID NO: 507; a light chain comprising SEQ ID NO: 351 and a heavy chain comprising SEQ ID NO: 508; a light chain comprising SEQ ID NO: 352 and a heavy chain comprising SEQ ID NO: 509; a light chain comprising SEQ ID NO: 353 and a heavy chain comprising SEQ ID NO: 510; a light chain comprising SEQ ID NO: 354 and a heavy chain comprising SEQ ID NO: 511; a light chain comprising SEQ ID NO: 355 and a heavy chain comprising SEQ ID NO: 512; a light chain comprising SEQ ID NO: 356 and a heavy chain comprising SEQ ID NO: 513; a light chain comprising SEQ ID NO: 357 and a heavy chain comprising SEQ ID NO: 514; a light chain comprising SEQ ID NO: 358 and a heavy chain comprising SEQ ID NO: 515; a light chain comprising SEQ ID NO: 359 and a heavy chain comprising SEQ ID NO: 516; a light chain comprising SEQ ID NO: 360 and a heavy chain comprising SEQ ID NO: 517; a light chain comprising SEQ ID NO: 361 and a heavy chain comprising SEQ ID NO: 518; a light chain comprising SEQ ID NO: 362 and a heavy chain comprising SEQ ID NO: 519; a light chain comprising SEQ ID NO: 363 and a heavy chain comprising SEQ ID NO: 520; a light chain comprising SEQ ID NO: 364 and a heavy chain comprising SEQ ID NO: 521; a light chain comprising SEQ ID NO: 365 and a heavy chain comprising SEQ ID NO: 522; a light chain comprising SEQ ID NO: 366 and a heavy chain comprising SEQ ID NO: 523; a light chain comprising SEQ ID NO: 367 and a heavy chain comprising SEQ ID NO: 524; a light chain comprising SEQ ID NO: 368 and a heavy chain comprising SEQ ID NO: 525; a light chain comprising SEQ ID NO: 369 and a heavy chain comprising SEQ ID NO: 526; a light chain comprising SEQ ID NO: 370 and a heavy chain comprising SEQ ID NO: 527; a light chain comprising SEQ ID NO: 371 and a heavy chain comprising SEQ ID NO: 528; a light chain comprising SEQ ID NO: 372 and a heavy chain comprising SEQ ID NO: 529; a light chain comprising SEQ ID NO: 373 and a heavy chain comprising SEQ ID NO: 530; a light chain comprising SEQ ID NO: 374 and a heavy chain comprising SEQ ID NO: 531; a light chain comprising SEQ ID NO: 375 and a heavy chain comprising SEQ ID NO: 532; a light chain comprising SEQ ID NO: 376 and a heavy chain comprising SEQ ID NO: 533; a light chain comprising SEQ ID NO: 377 and a heavy chain comprising SEQ ID NO: 534; a light chain comprising SEQ ID NO: 378 and a heavy chain comprising SEQ ID NO: 535; a light chain comprising SEQ ID NO: 379 and a heavy chain comprising SEQ ID NO: 536; a light chain comprising SEQ ID NO: 380 and a heavy chain comprising SEQ ID NO: 537; a light chain comprising SEQ ID NO: 381 and a heavy chain comprising SEQ ID NO: 538; a light chain comprising SEQ ID NO: 382 and a heavy chain comprising SEQ ID NO: 539; a light chain comprising SEQ ID NO: 383 and a heavy chain comprising SEQ ID NO: 540; a light chain comprising SEQ ID NO: 384 and a heavy chain comprising SEQ ID NO: 541; a light chain comprising SEQ ID NO: 385 and a heavy chain comprising SEQ ID NO: 542; a light chain comprising SEQ ID NO: 386 and a heavy chain comprising SEQ ID NO: 543; a light chain comprising SEQ ID NO: 387 and a heavy chain comprising SEQ ID NO: 544; a light chain comprising SEQ ID NO: 388 and a heavy chain comprising SEQ ID NO: 545; a light chain comprising SEQ ID NO: 389 and a heavy chain comprising SEQ ID NO: 546; a light chain comprising SEQ ID NO: 390 and a heavy chain comprising SEQ ID NO: 547; a light chain comprising SEQ ID NO: 391 and a heavy chain comprising SEQ ID NO: 548; a light chain comprising SEQ ID NO: 392 and a heavy chain comprising SEQ ID NO: 549; a light chain comprising SEQ ID NO: 393 and a heavy chain comprising SEQ ID NO: 550; a light chain comprising SEQ ID NO: 394 and a heavy chain comprising SEQ ID NO: 551; a light chain comprising SEQ ID NO: 395 and a heavy chain comprising SEQ ID NO: 552; a light chain comprising SEQ ID NO: 396 and a heavy chain comprising SEQ ID NO: 553; a light chain comprising SEQ ID NO: 397 and a heavy chain comprising SEQ ID NO: 554; a light chain comprising SEQ ID NO: 398 and a heavy chain comprising SEQ ID NO: 555; a light chain comprising SEQ ID NO: 399 and a heavy chain comprising SEQ ID NO: 556; a light chain comprising SEQ ID NO: 400 and a heavy chain comprising SEQ ID NO: 557; a light chain comprising SEQ ID NO: 401 and a heavy chain comprising SEQ ID NO: 558; a light chain comprising SEQ ID NO: 402 and a heavy chain comprising SEQ ID NO: 559; a light chain comprising SEQ ID NO: 403 and a heavy chain comprising SEQ ID NO: 560; a light chain comprising SEQ ID NO: 404 and a heavy chain comprising SEQ ID NO: 561; a light chain comprising SEQ ID NO: 405 and a heavy chain comprising SEQ ID NO: 562; a light chain comprising SEQ ID NO: 406 and a heavy chain comprising SEQ ID NO: 563; a light chain comprising SEQ ID NO: 407 and a heavy chain comprising SEQ ID NO: 564; a light chain comprising SEQ ID NO: 408 and a heavy chain comprising SEQ ID NO: 565; a light chain comprising SEQ ID NO: 409 and a heavy chain comprising SEQ ID NO: 566; a light chain comprising SEQ ID NO: 410 and a heavy chain comprising SEQ ID NO: 567; a light chain comprising SEQ ID NO: 411 and a heavy chain comprising SEQ ID NO: 568; a light chain comprising SEQ ID NO: 412 and a heavy chain comprising SEQ ID NO: 569; a light chain comprising SEQ ID NO: 413 and a heavy chain comprising SEQ ID NO: 570; a light chain comprising SEQ ID NO: 414 and a heavy chain comprising SEQ ID NO: 571; a light chain comprising SEQ ID NO: 415 and a heavy chain comprising SEQ ID NO: 572; a light chain comprising SEQ ID NO: 416 and a heavy chain comprising SEQ ID NO: 573; a light chain comprising SEQ ID NO: 417 and a heavy chain comprising SEQ ID NO: 574; a light chain comprising SEQ ID NO: 418 and a heavy chain comprising SEQ ID NO: 575; a light chain comprising SEQ ID NO: 419 and a heavy chain comprising SEQ ID NO: 576; a light chain comprising SEQ ID NO: 420 and a heavy chain comprising SEQ ID NO: 577; a light chain comprising SEQ ID NO: 421 and a heavy chain comprising SEQ ID NO: 578; a light chain comprising SEQ ID NO: 422 and a heavy chain comprising SEQ ID NO: 579; a light chain comprising SEQ ID NO: 423 and a heavy chain comprising SEQ ID NO: 580; a light chain comprising SEQ ID NO: 424 and a heavy chain comprising SEQ ID NO: 581; a light chain comprising SEQ ID NO: 425 and a heavy chain comprising SEQ ID NO: 582; a light chain comprising SEQ ID NO: 426 and a heavy chain comprising SEQ ID NO: 583; a light chain comprising SEQ ID NO: 427 and a heavy chain comprising SEQ ID NO: 584; a light chain comprising SEQ ID NO: 428 and a heavy chain comprising SEQ ID NO: 585; a light chain comprising SEQ ID NO: 429 and a heavy chain comprising SEQ ID NO: 586; a light chain comprising SEQ ID NO: 430 and a heavy chain comprising SEQ ID NO: 587; a light chain comprising SEQ ID NO: 431 and a heavy chain comprising SEQ ID NO: 588; a light chain comprising SEQ ID NO: 432 and a heavy chain comprising SEQ ID NO: 589; a light chain comprising SEQ ID NO: 433 and a heavy chain comprising SEQ ID NO: 590; a light chain comprising SEQ ID NO: 434 and a heavy chain comprising SEQ ID NO: 591; a light chain comprising SEQ ID NO: 435 and a heavy chain comprising SEQ ID NO: 592; a light chain comprising SEQ ID NO: 436 and a heavy chain comprising SEQ ID NO: 593; a light chain comprising SEQ ID NO: 437 and a heavy chain comprising SEQ ID NO: 594; a light chain comprising SEQ ID NO: 438 and a heavy chain comprising SEQ ID NO: 595; a light chain comprising SEQ ID NO: 439 and a heavy chain comprising SEQ ID NO: 596; a light chain comprising SEQ ID NO: 440 and a heavy chain comprising SEQ ID NO: 597; a light chain comprising SEQ ID NO: 441 and a heavy chain comprising SEQ ID NO: 598; a light chain comprising SEQ ID NO: 442 and a heavy chain comprising SEQ ID NO: 599; a light chain comprising SEQ ID NO: 443 and a heavy chain comprising SEQ ID NO: 600; a light chain comprising SEQ ID NO: 444 and a heavy chain comprising SEQ ID NO: 601; a light chain comprising SEQ ID NO: 445 and a heavy chain comprising SEQ ID NO: 602; a light chain comprising SEQ ID NO: 446 and a heavy chain comprising SEQ ID NO: 603; a light chain comprising SEQ ID NO: 447 and a heavy chain comprising SEQ ID NO: 604; a light chain comprising SEQ ID NO: 448 and a heavy chain comprising SEQ ID NO: 605; a light chain comprising SEQ ID NO: 449 and a heavy chain comprising SEQ ID NO: 606; a light chain comprising SEQ ID NO: 450 and a heavy chain comprising SEQ ID NO: 607; a light chain comprising SEQ ID NO: 451 and a heavy chain comprising SEQ ID NO: 608; a light chain comprising SEQ ID NO: 452 and a heavy chain comprising SEQ ID NO: 609; a light chain comprising SEQ ID NO: 453 and a heavy chain comprising SEQ ID NO: 610; a light chain comprising SEQ ID NO: 454 and a heavy chain comprising SEQ ID NO: 611; a light chain comprising SEQ ID NO: 455 and a heavy chain comprising SEQ ID NO: 612; a light chain comprising SEQ ID NO: 456 and a heavy chain comprising SEQ ID NO: 613; a light chain comprising SEQ ID NO: 457 and a heavy chain comprising SEQ ID NO: 614; a light chain comprising SEQ ID NO: 458 and a heavy chain comprising SEQ ID NO: 615; a light chain comprising SEQ ID NO: 459 and a heavy chain comprising SEQ ID NO: 616; a light chain comprising SEQ ID NO: 460 and a heavy chain comprising SEQ ID NO: 617; a light chain comprising SEQ ID NO: 461 and a heavy chain comprising SEQ ID NO: 618; a light chain comprising SEQ ID NO: 462 and a heavy chain comprising SEQ ID NO: 619; a light chain comprising SEQ ID NO: 463 and a heavy chain comprising SEQ ID NO: 620; a light chain comprising SEQ ID NO: 464 and a heavy chain comprising SEQ ID NO: 621; a light chain comprising SEQ ID NO: 465 and a heavy chain comprising SEQ ID NO: 622; a light chain comprising SEQ ID NO: 466 and a heavy chain comprising SEQ ID NO: 623; a light chain comprising SEQ ID NO: 467 and a heavy chain comprising SEQ ID NO: 624; a light chain comprising SEQ ID NO: 468 and a heavy chain comprising SEQ ID NO: 625; a light chain comprising SEQ ID NO: 469 and a heavy chain comprising SEQ ID NO: 626; a light chain comprising SEQ ID NO: 470 and a heavy chain comprising SEQ ID NO: 627; and a light chain comprising SEQ ID NO: 471 and a heavy chain comprising SEQ ID NO: 628, wherein
[0259] the antibody or functional fragment thereof comprises a cysteine or non-canonical amino acid amino acid substitution at one or more conjugation site(s) selected from the group consisting of
[0260] D70 of the antibody light chain relative to reference sequence SEQ ID NO: 455,
[0261] E276 of the antibody heavy chain relative to reference sequence SEQ ID NO: 612, and
[0262] T363 of the antibody heavy chain relative to reference sequence SEQ ID NO: 612.

[0263] In one embodiment, the peptide is a GLP-1 receptor agonist is GLP-1(7-37) or a GLP-1(7-37) analog.

[0264] In one embodiment, the peptide is a GLP-1 receptor agonist selected from the group consisting of exenatide, liraglutide, lixisenatide, albiglutide, dulaglutide, semaglutide, and taspoglutide.

[0265] In one embodiment, the peptide is a GLP-1 receptor agonist selected from the group consisting of GLP-1(7-37) (SEQ ID NO: 3184); GLP-1(7-36)-NH₂ (SEQ ID NO: 3185); liraglutide; albiglutide: taspoglutide; dulaglutide. semaglutide: LY2428757: Exendin-4 (SEQ ID NO: 3163); Exendin-3 (SEQ ID NO: 3164); Leu¹⁴-exendin-4 (SEQ ID NO: 3165); Leu¹⁴,Phe²⁵-exendin-4 (SEQ ID NO: 3166); Leu¹⁴,Ala¹⁹,Phe²⁵-exendin-4 (SEQ ID NO: 3167); exendin-4(1-30) (SEQ ID NO: 3168); Leu¹⁴-exendin-4(1-30) (SEQ ID NO: 3169); Leu¹⁴,Phe²⁵-exendin-4(1-30) (SEQ ID NO: 3170); Leu¹⁴,Ala¹⁹,Phe²⁵-exendin-4(1-30) (SEQ ID NO: 3171); exendin-4(1-28) (SEQ ID NO: 3172); Leu¹⁴-exendin-4(1-28) (SEQ ID NO: 3173); Leu¹⁴,Phe²⁵-exendin-4(1-28) (SEQ ID NO: 3174); Leu¹⁴,Ala¹⁹,Phe²⁵-exendin-4 (1-28) (SEQ ID NO: 3175); Leu¹⁴,Lys^{17,20},Ala¹⁹,Glu²¹,Phe²⁵,Gln²⁸-exendin-4 (SEQ ID NO: 3176); Leu¹⁴,Lys^{17,20},Ala¹⁹,Glu²¹,Gln²⁸-exendin-4 (SEQ ID NO: 3177); octylGly¹⁴,Gln²⁸-exendin-4 (SEQ ID NO: 3178); Leu¹⁴,Gln²⁸,octylGly³⁴-exendin-4 (SEQ ID NO: 3179); Phe⁴,Leu¹⁴,Gln²⁸,Lys³³,Glu³⁴, Ile^{35,36},Ser³⁷-exendin-4(1-37) (SEQ ID NO: 3180); Phe⁴,Leu¹⁴,Lys^{17,20},Ala¹⁹,Glu²¹,Gln²⁸-exendin-4 (SEQ ID NO: 3181); Val¹¹,Ile¹³,Leu¹⁴,Ala¹⁶,Lys²¹,Phe²⁵-exendin-4 (SEQ ID NO: 3182); exendin-4-Lys⁴⁰ (SEQ ID NO: 3183); GLP-1(7-37) (SEQ ID NO: 3184); GLP-1(7-36)-NH₂ (SEQ ID NO: 3185); Aib^{8,35},Arg^{26,34},Phe³¹-GLP-1(7-36)) (SEQ ID NO: 3186); HXaa₈EGTFTSDVSSYLEXaa₂₂Xaa₂₃AAKEFIXaa₃₀WLXaa₃₃Xaa₃₄Xaa₃₆Xaa₃₇; wherein Xaa₈ is A, V, or G; Xaa₂₂ is G, K, or E; Xaa₂₃ is Q or K; Xaa₃₀ is A or E; Xaa₃₃ is V or K; Xaa₃₄ is K, N, or R; Xaa₃₆ is R or G; and Xaa₃₇ is G, H, P, or absent (SEQ ID NO: 3187); Arg³⁴-GLP-1(7-37) (SEQ ID NO: 3188); Glu³⁰-GLP-1(7-37) (SEQ ID NO: 3189); Lys²²-GLP-1(7-37) (SEQ ID NO: 3190); Gly^{8,36},Glu²²-GLP-1(7-37) (SEQ ID NO: 3191); Val⁸,Glu²²,Gly³⁶-GLP-1(7-37) (SEQ ID NO: 3192); Gly^{8,36},Glu²²,Lys³³,Asn³⁴-GLP-1(7-37) (SEQ ID NO: 3193); Val⁸,Glu²²,Lys³³,Asn³³,Gly³⁶-GLP-1(7-37) (SEQ ID NO: 3194); Gly^{8,36},Glu²²,Pro³⁷-GLP-1(7-37) (SEQ ID NO: 3195); Val⁸,Glu²²,Gly³⁶,Pro³⁷-GLP-1(7-37) (SEQ ID NO: 3196); Gly^{8,36},Glu²²,Lys³³, Asn³⁴,Pro³⁷-GLP-1(7-37) (SEQ ID NO: 3197); Val⁸,Glu²²,Lys³³,Asn³⁴,Gy³⁶,Pro³⁷-GLP-1(7-37) (SEQ ID NO: 3198); Gy^{8,36},Glu²²-GLP-1(7-36) (SEQ ID NO: 3199); Val⁸,Glu²²,Gly³⁶-GLP-1(7-36) (SEQ ID NO: 3200); Val⁸,Glu²²,Asn³⁴,Gly³⁶-GLP-1(7-36) (SEQ ID NO: 3201); Gly^{8,36},Glu²²,Asn³⁴-GLP-1(7-36) (SEQ ID NO: 3202); GLP-1 analog (SEQ ID NO: 3206); GLP-1 analog (SEQ ID NO: 3207); [N^{e}-(17-carboxyheptadecanoic acid)Lys²⁰]exendin-4-NH₂ (SEQ ID NO: 3208); [N^{e}-(17-carboxyhepta-decanoyl)Lys³²]exendin-4-NH₂ (SEQ ID NO: 3209); [desamino-His¹,N^{e}-(17-carboxyheptadecanoyl)Lys²⁰]exendin-4-NH₂ (SEQ ID NO: 3210); [Arg^{12,27},NLe¹⁴,N^{e}-(17-carboxy-heptadecanoyl)Lys³²]exendin-4-NH₂ (SEQ ID NO: 3211); [N^{e}-(19-carboxy-nonadecanoylamino)Lys²⁰]-exendin-4-NH₂ (SEQ ID NO: 3212); [N^{e}-(15-carboxypentadecanoylamino)Lys²⁰]-exendin-4-NH₂ (SEQ ID NO: 3213); [N^{e}-(13-carboxytridecanoylamino)Lys²⁰]exendin-4-NH₂ (SEQ ID NO: 3214); [N^{e}-(11-carboxy-undecanoyl-amino)Lys²⁰]exendin-4-NH₂ (SEQ ID NO: 3215); exendin-4-Lys⁴⁰(e-MPA)-NH₂ (SEQ ID NO: 3216); exendin-4-Lys⁴⁰(e-AEEA-AEEA-MPA)-NH₂ (SEQ ID NO: 3217); exendin-4-Lys⁴⁰(e-AEEA-MPA)-NH₂ (SEQ ID NO: 3218); exendin-4-Lys⁴⁰(e-MPA)-albumin (SEQ ID NO: 3219); exendin-4-Lys⁴⁰(e-AEEA-AEEA-MPA)-albumin (SEQ ID NO: 3220); exendin-4-Lys⁴⁰(e-AEEA-MPA)-albumin (SEQ ID NO: 3221); desamino-His⁷,Arg²⁶,Lys²⁶(N^{e}-(γ-Glu(N-α-hexadecanoyl)))-GLP-1(7-37) (core peptide disclosed as SEQ ID NO: 3222) (SEQ ID NO: 3222); desamino-His⁷,Arg²⁶,Lys³⁴(N^{e}-octanoyl)-GLP-1(7-37) (SEQ ID NO: 3223); Arg^{26,34},Lys³⁸(N^{e}-(ω-carboxypentadecanoyl))-GLP-1(7-38) (SEQ ID NO: 3224); Arg^{26,34},Lys³⁶(N^{e}-(γ-Glu(N-α-hexadecanoyl)))-GLP-1(7-36) (core peptide disclosed as SEQ ID NO: 3225) (SEQ ID NO: 3225); [Aib⁸;Lys³⁷GLP-1_(7-37) (SEQ ID NO: 3226); [Aib⁸, Lys²⁶]GLP-1_(7-37) (SEQ ID NO: 3227); [Aib^{8,22},Lys³⁶GLP-1(7-36)-Amide (SEQ ID NO: 3228); [Aib^{8,22};BLeu¹²;Lys³⁶]GLP-1(7-36)-Amide (SEQ ID NO: 3229); [Aib^{8,22};Lys³⁷]GLP-1(7-37)-Amide (SEQ ID NO: 3230); [Aib^{8,22};BLeu³²;Lys³⁷]GLP-1(7-37)-Amide (SEQ ID NO: 3231); [Aib^{8,22};aMeLeu³²;Lys³⁷]GLP-1(7-37)-Amide (SEQ ID NO: 3232); [Aib^{8,22};AMEF¹²;Lys³⁷“GLP-1(7-37)-Amide (SEQ ID NO: 3233); [Aib^{8,22};BLeu¹⁶;Lys³⁷]GLP-1(7-37)-Amide (SEQ ID NO: 3234); [Aib^{8,22};Gly³⁶;Lys³⁷]GLP-1(7-37)-Amide (SEQ ID NO: 3235); [Aib^{8,22};Lys^{33,37};Asn³⁴;Gly³⁶]GLP-1(7-37)-Amide (SEQ ID NO: 3236); [Aib^{8,22}:Lys³³;Asn³⁴;Gly³⁶;Acea³⁷]GLP-1(7-37)-Acea-Lys-Amide (SEQ ID NO: 3237); [Aib^{8,22};Gly³⁶]GLP-1(7-37) (SEQ ID NO: 3238); cyclo[E²³-K²⁷][Aib⁸;Gly)]GLP-1(7-37) (SEQ ID NO: 3239); cyclo[E²²-K²⁶][Aib⁸;Gly³⁶;Lys³⁷]GLP-1(7-37)-Amide (SEQ ID NO: 3240); [Aib^{8,22}]-GLP-1(7-22)-Ex4(17-39) (SEQ ID NO: 3241); [Gly^{8,36};Glu²²]GLP-1(7-37) (SEQ ID NO: 3242); [Aib⁸;Glu²²;Gly³]GLP-1(7-37)-Amide (SEQ ID NO: 3243); [Aib⁸;Tyr¹⁶;Glu²;Gly³⁶]GLP-1_(7-37) (SEQ ID NO: 3244); [Aib⁸;Lys^{18,33};Glu^{22,23,30};Val²⁵;Arg²⁶;Leu²⁷;Asn³⁴;Gly³⁶]GLP-1(7-37) (SEQ ID NO: 3245); [Aib⁸;Lys^{18,33};Glu^{22,23,30};Val²⁷;Asn³⁴;Gly³⁶]GLP-1(7-37) (SEQ ID NO: 3246); [Aib⁸;Lys¹⁸;Glu^{22,23,30};Leu²⁷;Gy³⁶]GLP-1(7-37) (SEQ ID NO: 3247); [Aib^{8,22};Ile⁹;Gly³⁶]GLP-1_(7-36) (SEQ ID NO: 3248); and [Aib^{8,22};Glu¹⁵;Gly³⁶]GLP-1_(7-36) (SEQ ID NO: 3249).

[0266] In one embodiment, the peptide is a GLP-1(7-37) or GLP-1(7-37) analog conjugated to the antibody or fragment thereof at a residue that corresponds to K26, K36, K37, K39 or a C-terminal amine group of the analog.

[0267] In one embodiment, the peptide is conjugated to the via a peptide linker comprising a sequence selected from the group consisting of (Gly₃Ser)₂ (SEQ ID NO: 3350), (Gly₄Ser)₂ (SEQ ID NO: 3262), (Gly₃Ser)₃(SEQ ID NO: 3352), (Gly₄Ser)₃(SEQ ID NO: 3253), (Gly₃Ser)₄(SEQ ID NO: 3353), (Gly₄Ser)₄(SEQ ID NO: 3263), (Gly₃Ser)s(SEQ ID NO: 3354), (Gly₄Ser)₅(SEQ ID NO: 3264), (Gly₃Ser)₆(SEQ ID NO: 3356), (Gly₄Ser)₆(SEQ ID NO: 3355) and GGGGSGGGGSGGGGSK(SEQ ID NO: 3351).

[0268] The 466 amino acid sequence of human GIPR is (Volz et al., FEBS Lett. 373:23-29 (1995); NCBI Reference Sequence: NP_0001555):

(SEQ ID NO: 3141)
MTTSPILQLL LRLSLCGLLL QRAETGSKGQ TAGELYQRWE
RYRRECQETL AAAEPPSGLA CNGSFDMYVC WDYAAPNATA
RASCPWYLPW HHHVAAGFVL RQCGSDGQWG LWRDHTQCEN
PEKNEAFLDQ RLILERLQVM YTVGYSLSLA TLLLALLILS
LFRRLHCTRN YIHINLFTSF MLRAAAILSR DRLLPRPGPY
LGDQALALWN QALAACRTAQ IVTQYCVGAN YTWLLVEGVY
LHSLLVLVGG SEEGHFRYYL LLGWGAPALF VIPWVIVRYL
YENTQCWERN EVKAIWWIIR TPILMTILIN FLIFIRILGI
LLSKLRTRQM RCRDYRLRLA RSTLTLVPLL GVHEVVFAPV
TEEQARGALR FAKLGFEIFL SSFQGFLVSV LYCFINKEVQ
SEIRRGWHHC RLRRSLGEEQ RQLPERAFRA LPSGSGPGEV
PTSRGLSSGT LPGPGNEASR ELESYC
and is encoded by the DNA sequence (NCBI
Reference Sequence: NM_000164):
(SEQ ID NO: 3142)
ggcagcggtg gcaggggctg caggagcaag tgaccaggag
caggactggg gacaggcctg atcgcccctg cacgaaccag
acccttcgcc gccctcacga tgactacctc tccgatcctg
cagctgctgc tgcggctctc actgtgcggg ctgctgctcc
agagggcgga gacaggctct aaggggcaga cggcggggga
gctgtaccag cgctgggaac ggtaccgcag ggagtgccag
gagaccttgg cagccgcgga accgccttca ggcctcgcct
gtaacgggtc cttcgatatg tacgtctgct gggactatgc
tgcacccaat gccactgccc gtgcgtcctg cccctggtac
ctgccctggc accaccatgt ggctgcaggt ttcgtcctcc
gccagtgtgg cagtgatggc caatggggac tttggagaga
ccatacacaa tgtgagaacc cagagaagaa tgaggccttt
ctggaccaaa ggctcatctt ggagcggttg caggtcatgt
acactgtcgg ctactccctg tctctcgcca cactgctgct
agccctgctc atcttgagtt tgttcaggcg gctacattgc
actagaaact atatccacat caacctgttc acgtctttca
tgctgcgagc tgcggccatt ctcagccgag accgtctgct
acctcgacct ggcccctacc ttggggacca ggcccttgcg
ctgtggaacc aggccctcgc tgcctgccgc acggcccaga
tcgtgaccca gtactgcgtg ggtgccaact acacgtggct
gctggtggag ggcgtctacc tgcacagtct cctggtgctc
gtgggaggct ccgaggaggg ccacttccgc tactacctgc
tcctcggctg gggggccccc gcgcttttcg tcattccctg
ggtgatcgtc aggtacctgt acgagaacac gcagtgctgg
gagcgcaacg aagtcaaggc catttggtgg attatacgga
cccccatcct catgaccatc ttgattaatt tcctcatttt
tatccgcatt cttggcattc tcctgtccaa gctgaggaca
cggcaaatgc gctgccggga ttaccggctg aggctggctc
gctccacgct gacgctggtg cccctgctgg gtgtccacga
ggtggtgttt gctcccgtga cagaggaaca ggcccggggc
gccctgcgct tcgccaagct cggctttgag atcttcctca
gctccttcca gggcttcctg gtcagcgtcc tctactgctt
catcaacaag gaggtgcagt cggagatccg ccgtggctgg
caccactgcc gcctgcgccg cagcctgggc gaggagcaac
gccagctccc ggagcgcgcc ttccgggccc tgccctccgg
ctccggcccg ggcgaggtcc ccaccagccg cggcttgtcc
tcggggaccc tcccagggcc tgggaatgag gccagccggg
agttggaaag ttactgctag ggggcgggat ccccgtgtct
gttcagttag catggattta ttgagtgcca actgcgtgcc
aggcccagta cggaggacgc tggggaaatg gtgaaggaaa
cagaaaaaag gtccctgccc ttctggagat gacaactgag
tggggaaaac agaccgtgaa cacaaaacat caagttccac
acacgctatg gaatggttat gaagggaagc gagaaggggg
cctagggtgg tctgggaggc gtctccaagg aggtgacact
taagccatcc ccgaaagagg tgaaagagat cactttgggg
agagctggag aacaggattc taggcggaag cgatagcata
ggcaaaggcc cttgggcagg aaggcgctca gccttggctg
gagtagaatt aagtcagagc caacaggtgg ggagagacag
agaagtgggc aggggcaccc aagttgggat ttcatttcag
gtgcattgga gattcttagg agtgtctctt gggggtaata
ttttattttt taaaaaatga ggat.

[0269] A 430 amino acid isoform of human GIPR (isoform X1), predicted by automated computational analysis, has the sequence (NCBI Reference Sequence XP_005258790):

(SEQ ID NO: 3143)
MTTSPILQLL LRLSLCGLLL QRAETGSKGQ TAGELYQRWE
RYRRECQETL AAAEPPSVAA GFVLRQCGSD GQWGLWRDHT
QCENPEKNEA FLDQRLILER LQVMYTVGYS LSLATLLLAL
LILSLFRRLH CTRNYIHINL FTSFMLRAAA ILSRDRLLPR
PGPYLGDQAL ALWNQALAAC RTAQIVTQYC VGANYTWLLV
EGVYLHSLLV LVGGSEEGHF RYYLLLGWGA PALFVIPWVI
VRYLYENTQC WERNEVKAIW WIIRTPILMT ILINFLIFIR
ILGILLSKLR TRQMRCRDYR LRLARSTLTL VPLLGVHEVV
FAPVTEEQAR GALRFAKLGF EIFLSSFQGF LVSVLYCFIN
KEVQSEIRRG WHHCRLRRSL GEEQRQLPER AFRALPSGSG
PGEVPTSRGL SSGTLPGPGN EASRELESYC
and is encoded by the DNA sequence:
(SEQ ID NO: 3144)
atgaccacca gcccgattct gcagctgctg ctgcgcctga
gcctgtgcgg cctgctgctg cagcgcgcgg aaaccggcag
caaaggccag accgcgggcg aactgtatca gcgctgggaa
cgctatcgcc gcgaatgcca ggaaaccctg gcggcggcgg
aaccgccgag cgtggcggcg ggctttgtgc tgcgccagtg
cggcagcgat ggccagtggg gcctgtggcg cgatcatacc
cagtgcgaaa acccggaaaa aaacgaagcg tttctggatc
agcgcctgat tctggaacgc ctgcaggtga tgtataccgt
gggctatagc ctgagcctgg cgaccctgct gctggcgctg
ctgattctga gcctgtttcg ccgcctgcat tgcacccgca
actatattca tattaacctg tttaccagct ttatgctgcg
cgcggcggcg attctgagcc gcgatcgcct gctgccgcgc
ccgggcccgt atctgggcga tcaggcgctg gcgctgtgga
accaggcgct ggcggcgtgc cgcaccgcgc agattgtgac
ccagtattgc gtgggcgcga actatacctg gctgctggtg
gaaggcgtgt atctgcatag cctgctggtg ctggtgggcg
gcagcgaaga aggccatttt cgctattatc tgctgctggg
ctggggcgcg ccggcgctgt ttgtgattcc gtgggtgatt
gtgcgctatc tgtatgaaaa cacccagtgc tgggaacgca
acgaagtgaa agcgatttgg tggattattc gcaccccgat
tctgatgacc attctgatta actttctgat ttttattcgc
attctgggca ttctgctgag caaactgcgc acccgccaga
tgcgctgccg cgattatcgc ctgcgcctgg cgcgcagcac
cctgaccctg gtgccgctgc tgggcgtgca tgaagtggtg
tttgcgccgg tgaccgaaga acaggcgcgc ggcgcgctgc
gctttgcgaa actgggcttt gaaatttttc tgagcagctt
tcagggcttt ctggtgagcg tgctgtattg ctttattaac
aaagaagtgc agagcgaaat tcgccgcggc tggcatcatt
gccgcctgcg ccgcagcctg ggcgaagaac agcgccagct
gccggaacgc gcgtttcgcg cgctgccgag cggcagcggc
ccgggcgaag tgccgaccag ccgcggcctg agcagcggca
ccctgccggg cccgggcaac gaagcgagcc gcgaactgga
aagctattgc.

[0270] A 493 amino acid isoform of human GIPR, produced by alternative splicing, has the sequence (Gremlich et al., Diabetes 44:1202-8 (1995); UniProtKB Sequence Identifier: P48546-2):

(SEQ ID NO: 3145)
MTTSPILQLL LRLSLCGLLL QRAETGSKGQ TAGELYQRWE
RYRRECQETL AAAEPPSGLA CNGSFDMYVC WDYAAPNATA
RASCPWYLPW HHHVAAGFVL RQCGSDGQWG LWRDHTQCEN
PEKNEAFLDQ RLILERLQVM YTVGYSLSLA TLLLALLILS
LFRRLHCTRN YIHINLFTSF MLRAAAILSR DRLLPRPGPY
LGDQALALWN QALAACRTAQ IVTQYCVGAN YTWLLVEGVY
LHSLLVLVGG SEEGHFRYYL LLGWGAPALF VIPWVIVRYL
YENTQCWERN EVKAIWWIIR TPILMTILIN FLIFIRILGI
LLSKLRTRQM RCRDYRLRLA RSTLTLVPLL GVHEVVFAPV
TEEQARGALR FAKLGFEIFL SSFQGFLVSV LYCFINKEVG
RDPAAAPALW RRRGTAPPLS AIVSQVQSEI RRGWHHCRLR
RSLGEEQRQL PERAFRALPS GSGPGEVPTS RGLSSGTLPG
PGNEASRELE SYC
and is encoded by the DNA sequence:
(SEQ ID NO: 3146)
atgaccacca gcccgattct gcagctgctg ctgcgcctga
gcctgtgcgg cctgctgctg cagcgcgcgg aaaccggcag
caaaggccag accgcgggcg aactgtatca gcgctgggaa
cgctatcgcc gcgaatgcca ggaaaccctg gcggcggcgg
aaccgccgag cggcctggcg tgcaacggca gctttgatat
gtatgtgtgc tgggattatg cggcgccgaa cgcgaccgcg
cgcgcgagct gcccgtggta tctgccgtgg catcatcatg
tggcggcggg ctttgtgctg cgccagtgcg gcagcgatgg
ccagtggggc ctgtggcgcg atcataccca gtgcgaaaac
ccggaaaaaa acgaagcgtt tctggatcag cgcctgattc
tggaacgcct gcaggtgatg tataccgtgg gctatagcct
gagcctggcg accctgctgc tggcgctgct gattctgagc
ctgtttcgcc gcctgcattg cacccgcaac tatattcata
ttaacctgtt taccagcttt atgctgcgcg cggcggcgat
tctgagccgc gatcgcctgc tgccgcgccc gggcccgtat
ctgggcgatc aggcgctggc gctgtggaac caggcgctgg
cggcgtgccg caccgcgcag attgtgaccc agtattgcgt
gggcgcgaac tatacctggc tgctggtgga aggcgtgtat
ctgcatagcc tgctggtgct ggtgggcggc agcgaagaag
gccattttcg ctattatctg ctgctgggct ggggcgcgcc
ggcgctgttt gtgattccgt gggtgattgt gcgctatctg
tatgaaaaca cccagtgctg ggaacgcaac gaagtgaaag
cgatttggtg gattattcgc accccgattc tgatgaccat
tctgattaac tttctgattt ttattcgcat tctgggcatt
ctgctgagca aactgcgcac ccgccagatg cgctgccgcg
attatcgcct gcgcctggcg cgcagcaccc tgaccctggt
gccgctgctg ggcgtgcatg aagtggtgtt tgcgccggtg
accgaagaac aggcgcgcgg cgcgctgcgc tttgcgaaac
tgggctttga aatttttctg agcagctttc agggctttct
ggtgagcgtg ctgtattgct ttattaacaa agaagtgggc
cgcgatccgg cggcggcgcc ggcgctgtgg cgccgccgcg
gcaccgcgcc gccgctgagc gcgattgtga gccaggtgca
gagcgaaatt cgccgcggct ggcatcattg ccgcctgcgc
cgcagcctgg gcgaagaaca gcgccagctg ccggaacgcg
cgtttcgcgc gctgccgagc ggcagcggcc cgggcgaagt
gccgaccagc cgcggcctga gcagcggcac cctgccgggc
ccgggcaacg aagcgagccg cgaactggaa agctattgct aa

[0271] The 460 amino acid sequence of murine GIPR is (NCBI Reference Sequence: NP_001074284; uniprotKB/Swiss-Prot Q0P543-1); see Vassilatis et al., PNAS USA 2003, 100:4903-4908.

(SEQ ID NO: 3147)
MPLRLLLLLL WLWGLQWAET DSEGQTTTGE LYQRWEHYGQ
ECQKMLETTE PPSGLACNGS FDMYACWNYT AANTTARVSC
PWYLPWFRQV SAGFVFRQCG SDGQWGSWRD HTQCENPEKN
GAFQDQTLIL ERLQIMYTVG YSLSLTTLLL ALLILSLFRR
LHCTRNYIHM NLFTSFMLRA AAILTRDQLL PPLGPYTGDQ
APTPWNQALA ACRTAQIMTQ YCVGANYTWL LVEGVYLHHL
LVIVGRSEKG HFRCYLLLGW GAPALFVIPW VIVRYLRENT
QCWERNEVKA IWWIIRTPIL ITILINFLIF IRILGILVSK
LRTRQMRCPD YRLRLARSTL TLVPLLGVHE VVFAPVTEEQ
VEGSLRFAKL AFEIFLSSFQ GFLVSVLYCFINKEVQSEIRQ
GWRHRRLRLS LQEQRPRPHQ ELAPRAVPLS SACREAAVGN
ALPSGMLHVP GDEVLESYC
and is encoded by the DNA sequence (NCBI
Reference Sequence: NM_001080815):
(SEQ ID NO: 3148)
atgccgctgc gcctgctgct gctgctgctg tggctgtggg
gcctgcagtg ggcggaaacc gatagcgaag gccagaccac
caccggcgaa ctgtatcagc gctgggaaca ttatggccag
gaatgccaga aaatgctgga aaccaccgaa ccgccgagcg
gcctggcgtg caacggcagc tttgatatgt atgcgtgctg
gaactatacc gcggcgaaca ccaccgcgcg cgtgagctgc
ccgtggtatc tgccgtggtt tcgccaggtg agcgcgggct
ttgtgtttcg ccagtgcggc agcgatggcc agtggggcag
ctggcgcgat catacccagt gcgaaaaccc ggaaaaaaac
ggcgcgtttc aggatcagac cctgattctg gaacgcctgc
agattatgta taccgtgggc tatagcctga gcctgaccac
cctgctgctg gcgctgctga ttctgagcct gtttcgccgc
ctgcattgca cccgcaacta tattcatatg aacctgttta
ccagctttat gctgcgcgcg gcggcgattc tgacccgcga
tcagctgctg ccgccgctgg gcccgtatac cggcgatcag
gcgccgaccc cgtggaacca ggcgctggcg gcgtgccgca
ccgcgcagat tatgacccag tattgcgtgg gcgcgaacta
tacctggctg ctggtggaag gcgtgtatct gcatcatctg
ctggtgattg tgggccgcag cgaaaaaggc cattttcgct
gctatctgct gctgggctgg ggcgcgccgg cgctgtttgt
gattccgtgg gtgattgtgc gctatctgcg cgaaaacacc
cagtgctggg aacgcaacga agtgaaagcg atttggtgga
ttattcgcac cccgattctg attaccattc tgattaactt
tctgattttt attcgcattc tgggcattct ggtgagcaaa
ctgcgcaccc gccagatgcg ctgcccggat tatcgcctgc
gcctggcgcg cagcaccctg accctggtgc cgctgctggg
cgtgcatgaa gtggtgtttg cgccggtgac cgaagaacag
gtggaaggca gcctgcgctt tgcgaaactg gcgtttgaaa
tttttctgag cagctttcag ggctttctgg tgagcgtgct
gtattgcttt attaacaaag aagtgcagag cgaaattcgc
cagggctggc gccatcgccg cctgcgcctg agcctgcagg
aacagcgccc gcgcccgcat caggaactgg cgccgcgcgc
ggtgccgctg agcagcgcgt gccgcgaagc ggcggtgggc
aacgcgctgc cgagcggcat gctgcatgtg ccgggcgatg
aagtgctgga aagctattgc taa

[0272] A 230 amino acid isoform of murine GIPR, produced by alternative splicing, has the sequence (Gerhard et al., Genome Res, 14:2121-2127 (2004); NCBI Reference Sequence: AAI20674):

(SEQ ID NO: 3149)
MPLRLLLLLL WLWGLQWAET DSEGQTTTGE LYQRWEHYGQ
ECQKMLETTE PPSGLACNGS FDMYACWNYT AANTTARVSC
PWYLPWFRQV SAGFVFRQCG SDGQWGSWRD HTQCENPEKN
GAFQDQTLIL ERLQIMYTVG YSLSLTTLLL ALLILSLFRR
LHCTRNYIHM NLFTSFMLRA AAILTRDQLL PPLGPYTGDQ
APTPWNQVLH RLLPGGTKTF PIYFRTFPHH
and is encoded by the DNA sequence:
(SEQ ID NO: 3150)
atgccgctgc gcctgctgct gctgctgctg tggctgtggg
gcctgcagtg ggcggaaacc gatagcgaag gccagaccac
caccggcgaa ctgtatcagc gctgggaaca ttatggccag
gaatgccaga aaatgctgga aaccaccgaa ccgccgagcg
gcctggcgtg caacggcagc tttgatatgt atgcgtgctg
gaactatacc gcggcgaaca ccaccgcgcg cgtgagctgc
ccgtggtatc tgccgtggtt tcgccaggtg agcgcgggct
ttgtgtttcg ccagtgcggc agcgatggcc agtggggcag
ctggcgcgat catacccagt gcgaaaaccc ggaaaaaaac
ggcgcgtttc aggatcagac cctgattctg gaacgcctgc
agattatgta taccgtgggc tatagcctga gcctgaccac
cctgctgctg gcgctgctga ttctgagcct gtttcgccgc
ctgcattgca cccgcaacta tattcatatg aacctgttta
ccagctttat gctgcgcgcg gcggcgattc tgacccgcga
tcagctgctg ccgccgctgg gcccgtatac cggcgatcag
gcgccgaccc cgtggaacca ggtgctgcat cgcctgctgc
cgggcggcac caaaaccttt ccgatttatt ttcgcacctt
tccgcatcat taa.

[0273] As stated herein, the term “GIPR polypeptide” encompasses naturally occurring GIPR polypeptide sequences, e.g., human amino acid sequences SEQ ID NOs: 3141, 3143 or 3145. The term “GIPR polypeptide,” however, also encompasses polypeptides comprising an amino acid sequence that differs from the amino acid sequence of a naturally occurring GIPR polypeptide sequence, e.g., SEQ ID NOs: 3141, 3143 or 3145, by one or more amino acids, such that the sequence is at least 90% identical to SEQ ID NOs: 3141, 3143 or 3145. GIPR polypeptides can be generated by introducing one or more amino acid substitutions, either conservative or non-conservative and using naturally or non-naturally occurring amino acids, at particular positions of the GIPR polypeptide.

[0274] A “conservative amino acid substitution” can involve a substitution of a native amino acid residue (i.e., a residue found in a given position of the wild-type GIPR polypeptide sequence) with a nonnative residue (i.e., a residue that is not found in a given position of the wild-type GIPR polypeptide sequence) such that there is little or no effect on the polarity or charge of the amino acid residue at that position. Conservative amino acid substitutions also encompass non-naturally occurring amino acid residues that are typically incorporated by chemical peptide synthesis rather than by synthesis in biological systems. These include peptidomimetics, and other reversed or inverted forms of amino acid moieties.

[0275] Naturally occurring residues can be divided into classes based on common side chain properties:
[0276] (1) hydrophobic: norleucine, Met, Ala, Val, Leu, Ile;
[0277] (2) neutral hydrophilic: Cys, Ser, Thr;
[0278] (3) acidic: Asp, Glu;
[0279] (4) basic: Asn, Gin, His, Lys, Arg;
[0280] (5) residues that influence chain orientation: Gly, Pro; and
[0281] (6) aromatic: Trp, Tyr, Phe.

[0282] Additional groups of amino acids can also be formulated using the principles described in, e.g., Creighton (1984) PROTEINS: STRUCTURE AND MOLECULAR PROPERTIES (2d Ed. 1993), W.H. Freeman and Company. In some instances it can be useful to further characterize substitutions based on two or more of such features (e.g., substitution with a “small polar” residue, such as a Thr residue, can represent a highly conservative substitution in an appropriate context).

[0283] Conservative substitutions can involve the exchange of a member of one of these classes for another member of the same class. Non-conservative substitutions can involve the exchange of a member of one of these classes for a member from another class.

[0284] Synthetic, rare, or modified amino acid residues having known similar physiochemical properties to those of an above-described grouping can be used as a “conservative” substitute for a particular amino acid residue in a sequence. For example, a D-Arg residue may serve as a substitute for a typical L-Arg residue. It also can be the case that a particular substitution can be described in terms of two or more of the above described classes (e.g., a substitution with a small and hydrophobic residue means substituting one amino acid with a residue(s) that is found in both of the above-described classes or other synthetic, rare, or modified residues that are known in the art to have similar physiochemical properties to such residues meeting both definitions).

[0285] Nucleic acid sequences encoding a GIPR polypeptide provided herein, including those degenerate to SEQ ID NOs: 3141, 3143 or 3145, and those encoding polypeptide variants of SEQ ID NOs: 3141, 3143 or 3145 form other aspects of the instant disclosure.

[0286] In order to express the GIPR nucleic acid sequences provided herein, the appropriate coding sequences, e.g., SEQ ID NOs: 3141, 3143 or 3145, can be cloned into a suitable vector and after introduction in a suitable host, the sequence can be expressed to produce the encoded polypeptide according to standard cloning and expression techniques, which are known in the art (e.g., as described in Sambrook, J., Fritsh, E. F., and Maniatis, T. Molecular Cloning: A Laboratory Manual 2nd, ed., Cold Spring Harbor Laboratory, Cold Spring Harbor Laboratory Press, Cold Spring Harbor, N.Y., 1989). The invention also relates to such vectors comprising a nucleic acid sequence according to the invention.

[0287] A “vector” refers to a delivery vehicle that (a) promotes the expression of a polypeptide-encoding nucleic acid sequence; (b) promotes the production of the polypeptide therefrom; (c) promotes the transfection/transformation of target cells therewith; (d) promotes the replication of the nucleic acid sequence; (e) promotes stability of the nucleic acid; (f) promotes detection of the nucleic acid and/or transformed/transfected cells; and/or (g) otherwise imparts advantageous biological and/or physiochemical function to the polypeptide-encoding nucleic acid. A vector can be any suitable vector, including chromosomal, non-chromosomal, and synthetic nucleic acid vectors (a nucleic acid sequence comprising a suitable set of expression control elements). Examples of such vectors include derivatives of SV40, bacterial plasmids, phage DNA, baculovirus, yeast plasmids, vectors derived from combinations of plasmids and phage DNA, and viral nucleic acid (RNA or DNA) vectors.

[0288] A recombinant expression vector can be designed for expression of a GIPR protein in prokaryotic (e.g., E. coli) or eukaryotic cells (e.g., insect cells, using baculovirus expression vectors, yeast cells, or mammalian cells). In one embodiment the host cell is a mammalian, non-human host cell. Representative host cells include those hosts typically used for cloning and expression, including Escherichia coli strains TOP10F′, TOP10, DH10B, DH5a, HB101, W3110, BL21(DE3) and BL21 (DE3)pLysS, BLUESCRIPT (Stratagene), mammalian cell lines CHO, CHO-K1, HEK293, 293-EBNA pIN vectors (Van Heeke & Schuster, J. Biol. Chem. 264: 5503-5509 (1989); pET vectors (Novagen, Madison Wis.). Alternatively, the recombinant expression vector can be transcribed and translated in vitro, for example using T7 promoter regulatory sequences and T7 polymerase and an in vitro translation system. Preferably, the vector contains a promoter upstream of the cloning site containing the nucleic acid sequence encoding the polypeptide. Examples of promoters, which can be switched on and off, include the lac promoter, the T7 promoter, the trc promoter, the tac promoter and the trp promoter.

[0289] Thus, provided herein are vectors comprising a nucleic acid sequence encoding GIPR that facilitate the expression of recombinant GIPR. In various embodiments, the vectors comprise an operably linked nucleotide sequence which regulates the expression of GIPR. A vector can comprise or be associated with any suitable promoter, enhancer, and other expression-facilitating elements. Examples of such elements include strong expression promoters (e.g., a human CMV IE promoter/enhancer, an RSV promoter, SV40 promoter, SL3-3 promoter, MMTV promoter, or HIV LTR promoter, EF1alpha promoter, CAG promoter), effective poly (A) termination sequences, an origin of replication for plasmid product in E. coli, an antibiotic resistance gene as a selectable marker, and/or a convenient cloning site (e.g., a polylinker). Vectors also can comprise an inducible promoter as opposed to a constitutive promoter such as CMV IE. In one aspect, a nucleic acid comprising a sequence encoding a GIPR polypeptide which is operatively linked to a tissue specific promoter which promotes expression of the sequence in a metabolically-relevant tissue, such as liver or pancreatic tissue is provided.

[0290] In another aspect of the instant disclosure, host cells comprising the GIPR nucleic acids and vectors disclosed herein are provided. In various embodiments, the vector or nucleic acid is integrated into the host cell genome, which in other embodiments the vector or nucleic acid is extra-chromosomal.

[0291] Recombinant cells, such as yeast, bacterial (e.g., E. coli), and mammalian cells (e.g., immortalized mammalian cells) comprising such a nucleic acid, vector, or combinations of either or both thereof are provided. In various embodiments cells comprising a non-integrated nucleic acid, such as a plasmid, cosmid, phagemid, or linear expression element, which comprises a sequence coding for expression of a GIPR polypeptide, are provided.

[0292] A vector comprising a nucleic acid sequence encoding a GIPR polypeptide provided herein can be introduced into a host cell by transformation or by transfection. Methods of transforming a cell with an expression vector are well known.

[0293] A GIPR-encoding nucleic acid can be positioned in and/or delivered to a host cell or host animal via a viral vector. Any suitable viral vector can be used in this capacity. A viral vector can comprise any number of viral polynucleotides, alone or in combination with one or more viral proteins, which facilitate delivery, replication, and/or expression of the nucleic acid of the invention in a desired host cell. The viral vector can be a polynucleotide comprising all or part of a viral genome, a viral protein/nucleic acid conjugate, a virus-like particle (VLP), or an intact virus particle comprising viral nucleic acids and a GIPR polypeptide-encoding nucleic acid. A viral particle viral vector can comprise a wild-type viral particle or a modified viral particle. The viral vector can be a vector which requires the presence of another vector or wild-type virus for replication and/or expression (e.g., a viral vector can be a helper-dependent virus), such as an adenoviral vector amplicon. Typically, such viral vectors consist of a wild-type viral particle, or a viral particle modified in its protein and/or nucleic acid content to increase transgene capacity or aid in transfection and/or expression of the nucleic acid (examples of such vectors include the herpes virus/AAV amplicons). Typically, a viral vector is similar to and/or derived from a virus that normally infects humans. Suitable viral vector particles in this respect, include, for example, adenoviral vector particles (including any virus of or derived from a virus of the adenoviridae), adeno-associated viral vector particles (AAV vector particles) or other parvoviruses and parvoviral vector particles, papillomaviral vector particles, flaviviral vectors, alphaviral vectors, herpes viral vectors, pox virus vectors, retroviral vectors, including lentiviral vectors.

[0294] A GIPR polypeptide expressed as described herein can be isolated using standard protein purification methods. A GIPR polypeptide can be isolated from a cell in which is it naturally expressed or it can be isolated from a cell that has been engineered to express GIPR, for example a cell that does not naturally express GIPR.

[0295] Protein purification methods that can be employed to isolate a GIPR polypeptide, as well as associated materials and reagents, are known in the art. Additional purification methods that may be useful for isolating a GIPR polypeptide can be found in references such as Bootcov M R, 1997, Proc. Natl. Acad. Sci. USA 94:11514-9, Fairlie W D, 2000, Gene 254: 67-76.

[0296] Antagonist antigen binding proteins that bind GIPR, including human GIPR (hGIPR) are provided herein. In one embodiment, the human GIPR has the sequence as such as set forth in SEQ ID NO: 3141. In another embodiment, the human GIPR has the sequence as such set forth in SEQ ID NO: 3143. In another embodiment, the human GIPR has the sequence as such set forth in SEQ ID NO: 3145.

[0297] In one aspect the present invention is directed to a composition comprising an antibody or functional fragment thereof that specifically binds to human GIPR, wherein the antibody or functional fragment thereof comprises a cysteine or non-canonical amino acid amino acid substitution at one or more conjugation site(s); and a GLP-1 receptor agonist, wherein the GLP-1 receptor agonist is conjugated to the antibody or functional fragment thereof through the side-chain of the cysteine residue or non-canonical amino acid residue substituted at the one or more conjugation site(s).

[0298] The antigen binding proteins provided are polypeptides into which one or more complementary determining regions (CDRs), as described herein, are embedded and/or joined. In some antigen binding proteins, the CDRs are embedded into a “framework” region, which orients the CDR(s) such that the proper antigen binding properties of the CDR(s) are achieved. Certain antigen binding proteins described herein are antibodies or are derived from antibodies. In other antigen binding proteins, the CDR sequences are embedded in a different type of protein scaffold. The various structures are further described below.

[0299] The antigen binding proteins that are disclosed herein have a variety of utilities. The antigen binding proteins, for instance, are useful in specific binding assays, affinity purification of GIPR, and in screening assays to identify other antagonists of GIPR activity. Other uses for the antigen binding proteins include, for example, diagnosis of GIPR-associated diseases or conditions and screening assays to determine the presence or absence of GIPR. Given that the antigen binding proteins that are provided are antagonists, the GIPR antigen binding proteins have value in therapeutic methods in which it is useful to reduce weight gain, even while maintaining or increasing food intake, increasing % fat mass and increasing % lean mass, improving glucose tolerance, decreasing insulin levels, decreasing cholesterol and triglyceride levels. Accordingly, the antigen binding proteins have utility in the treatment and prevention of diabetes, e.g., type 2 diabetes, obesity, dyslipidemia, elevated glucose levels or elevated insulin levels.

[0300] A variety of selective binding agents useful for modulating the activity of GIPR are provided. These agents include, for instance, antigen binding proteins that contain an antigen binding domain (e.g., scFvs, domain antibodies, and polypeptides with an antigen binding region) and specifically bind to a GIPR polypeptide, in particular human GIPR. Some of the agents, for example, are useful in enhancing the activity of GIPR, and can activate one or more activities associated with GIPR.

[0301] In general the antigen binding proteins that are provided typically comprise one or more CDRs as described herein (e.g., 1, 2, 3, 4, 5 or 6). In some instances, the antigen binding protein comprises (a) a polypeptide structure and (b) one or more CDRs that are inserted into and/or joined to the polypeptide structure. The polypeptide structure can take a variety of different forms. For example, it can be, or comprise, the framework of a naturally occurring antibody, or fragment or variant thereof, or may be completely synthetic in nature. Examples of various polypeptide structures are further described below.

[0302] In certain embodiments, the polypeptide structure of the antigen binding proteins is an antibody or is derived from an antibody. Accordingly, examples of certain antigen binding proteins that are provided include, but are not limited to, monoclonal antibodies, bispecific antibodies, minibodies, domain antibodies such as Nanobodies®, synthetic antibodies (sometimes referred to herein as “antibody mimetics”), chimeric antibodies, humanized antibodies, human antibodies, antibody fusions, and portions or fragments of each, respectively. In some instances, the antigen binding protein is an immunological fragment of a complete antibody (e.g., a Fab, a Fab′, a F(ab)2). In other instances the antigen binding protein is a scFv that uses CDRs from an antibody of the present invention.

[0303] The antigen binding proteins as provided herein specifically bind to a human GIPR. In a specific embodiment, the antigen binding protein specifically binds to human GIPR comprising or consisting of the amino acid sequence of SEQ ID NO: 3141. In a specific embodiment, the antigen binding protein specifically binds to human GIPR comprising or consisting of the amino acid sequence of SEQ ID NO: 3143. In a specific embodiment, the antigen binding protein specifically binds to human GIPR comprising or consisting of the amino acid sequence of SEQ ID NO: 3145.

[0304] The antigen binding proteins that are provided are antagonists and typically have one, two, three, four, five, six, seven or all eight of the following characteristics:
[0305] (a) ability to prevent or reduce binding of GIP to GIPR, where the levels can be measured, for example, by the methods such as radioactive- or fluorescence-labeled ligand binding study, or by the methods described herein (e.g. cAMP assay or other functional assays). The decrease can be at least 10, 25, 50, 100% or more relative to the pre-treatment levels of SEQ ID NO: 3141, 3143 or 3145 under comparable conditions.
[0306] (b) ability to decrease blood glucose;
[0307] (c) ability to increase glucose tolerance;
[0308] (d) ability to increase insulin sensitivity;
[0309] (e) ability to decrease body weight or reduce body weight gain;
[0310] (f) ability to decrease fat mass or decrease inflammation in fat tissue;
[0311] (g) ability to decrease fasting insulin levels;
[0312] (h) ability to decrease circulating cholesterol levels;
[0313] (i) ability to decrease circulating triglyceride levels;
[0314] (j) ability to decrease liver steatosis or reduce triglyceride level in liver;
[0315] (k) decrease AST, ALT, and/or ALP levels.

[0316] In one embodiment, a GIPR antigen binding protein has one or more of the following activities:
[0317] (a) binds human GIPR such that KD is ≤200 nM, is ≤150 nM, is ≤100 nM, is ≤50 nM, is ≤10 nM, is ≤5 nM, is ≤2 nM, or is ≤1 nM, e.g., as measured via a surface plasma resonance or kinetic exclusion assay technique.
[0318] (b) has a half-life in human serum of at least 3 days;

[0319] Some antigen binding proteins that are provided have an on-rate (ka) for GIPR of at least 10⁴/M×seconds, at least 10⁵/M×seconds, or at least 10⁶/M×seconds as measured, for instance, as described below. Certain antigen binding proteins that are provided have a slow dissociation rate or off-rate. Some antigen binding proteins, for instance, have a kd (off-rate) of 1×10² s⁻¹, or 1×10³ s⁻¹, or 1×10⁻⁴ s⁻¹, or 1×10⁻⁵ s⁻¹. In certain embodiments, the antigen binding protein has a KD (equilibrium binding affinity) of less than 25 pM, 50 pM, 100 pM, 500 pM, 1 nM, 5 nM, 10 nM, 25 nM or 50 nM.

[0320] In another aspect, an antigen-binding protein is provided having a half-life of at least one day in vitro or in vivo (e.g., when administered to a human subject). In one embodiment, the antigen binding protein has a half-life of at least three days. In various other embodiments, the antigen binding protein has a half-life of 4, 5, 6, 7, 8, 9, 10, 15, 20, 25, 30, 40, 50, or 60 days or longer. In another embodiment, the antigen binding protein is derivatized or modified such that it has a longer half-life as compared to the underivatized or unmodified antibody. In another embodiment, the antigen binding protein contains point mutations to increase serum half-life. Further details regarding such mutant and derivatized forms are provided below.

[0321] Some of the antigen binding proteins that are provided have the structure typically associated with naturally occurring antibodies. The structural units of these antibodies typically comprise one or more tetramers, each composed of two identical couplets of polypeptide chains, though some species of mammals also produce antibodies having only a single heavy chain. In a typical antibody, each pair or couplet includes one full-length “light” chain (in certain embodiments, about 25 kDa) and one full-length “heavy” chain (in certain embodiments, about 50-70 kDa). Each individual immunoglobulin chain is composed of several “immunoglobulin domains”, each consisting of roughly 90 to 110 amino acids and expressing a characteristic folding pattern. These domains are the basic units of which antibody polypeptides are composed. The amino-terminal portion of each chain typically includes a variable domain that is responsible for antigen recognition. The carboxy-terminal portion is more conserved evolutionarily than the other end of the chain and is referred to as the “constant region” or “C region”. Human light chains generally are classified as kappa and lambda light chains, and each of these contains one variable domain and one constant domain. Heavy chains are typically classified as mu, delta, gamma, alpha, or epsilon chains, and these define the antibody's isotype as IgM, IgD, IgG, IgA, and IgE, respectively. IgG has several subtypes, including, but not limited to, IgG1, IgG2, IgG3, and IgG4. IgM subtypes include IgM, and IgM2. IgA subtypes include IgA1 and IgA2. In humans, the IgA and IgD isotypes contain four heavy chains and four light chains; the IgG and IgE isotypes contain two heavy chains and two light chains; and the IgM isotype contains five heavy chains and five light chains. The heavy chain C region typically comprises one or more domains that may be responsible for effector function. The number of heavy chain constant region domains will depend on the isotype. IgG heavy chains, for example, each contain three C region domains known as CHI, CH2 and CH3. The antibodies that are provided can have any of these isotypes and subtypes. In certain embodiments, the GIPR antibody is of the IgG1, IgG2, or IgG4 subtype. The terms “GIPR antibody” and “anti-GIPR antibody” are used interchangeably throughout this application and figures. Both terms refer to an antibody that binds to GIPR.

[0322] In full-length light and heavy chains, the variable and constant regions are joined by a “J” region of about twelve or more amino acids, with the heavy chain also including a “D” region of about ten more amino acids. See, e.g. Fundamental Immunology, 2nd ed., Ch. 7 (Paul, W., ed.) 1989, New York: Raven Press (hereby incorporated by reference in its entirety for all purposes). The variable regions of each light/heavy chain pair typically form the antigen binding site.

[0323] For the antibodies provided herein, the variable regions of immunoglobulin chains generally exhibit the same overall structure, comprising relatively conserved framework regions (FR) joined by three hypervariable regions, more often called “complementarity determining regions” or CDRs. The CDRs from the two chains of each heavy chain/light chain pair mentioned above typically are aligned by the framework regions to form a structure that binds specifically with a specific epitope on GIPR. From N-terminal to C-terminal, naturally-occurring light and heavy chain variable regions both typically conform with the following order of these elements: FR1, CDR1, FR2, CDR2, FR3, CDR3 and FR4. A numbering system has been devised for assigning numbers to amino acids that occupy positions in each of these domains. This numbering system is defined in Kabat Sequences of Proteins of Immunological Interest (1987 and 1991, NIH, Bethesda, Md.), or Chothia & Lesk, 1987, J. Mol. Biol. 196:901-917; Chothia et al., 1989, Nature 342:878-883.

[0324] The sequence information for specific antibodies prepared and identified as described in the Examples below is summarized in TABLE 1. Thus, in an embodiment, an antigen binding protein is an antibody with the CDR, variable domain and light and heavy chain sequences as specified in one of the rows of TABLE 1.

[0325] SEQ ID NOs have been assigned to variable light chain, variable heavy chain, light chain, heavy chain, CDRL1, CDRL2, CDRL3, CDRH1, CDRH2, and CDRH3 sequences of the antibodies and fragments thereof of the present invention and are shown in TABLE 1. SEQ ID NOs have also been assigned to polynucleotides encoding the variable light chain, variable heavy chain, light chain, heavy chain, CDRL1, CDRL2, CDRL3, CDRH1, CDRH2, and CDRH3 sequences of the antibodies and fragments thereof of the present invention and are shown in TABLE 2. The antigen binding proteins of the present invention can be identified by SEQ ID NO, but also by construct name (e.g., 2C2.005) or identifier number (e.g., iPS:336175). The antigen binding proteins identified in Tables 1-below can be grouped into families based on construct name. For example, the “4B1 family” includes the constructs 4B1, 4B1.010, 4B1.011, 4B1.012, 4B1.013, 4B1.014, 4B1.015, and 4B1.016.

[0326] The various light chain and heavy chain variable regions provided herein are depicted in TABLE 3. Each of these variable regions may be attached to a heavy or light chain constant regions to form a complete antibody heavy and light chain, respectively. Furthermore, each of the so generated heavy and light chain sequences may be combined to form a complete antibody structure.

Lengthy table referenced here
US20250108121A1-20250403-T00001
Please refer to the end of the specification for access instructions.

Lengthy table referenced here
US20250108121A1-20250403-T00002
Please refer to the end of the specification for access instructions.

Lengthy table referenced here
US20250108121A1-20250403-T00003
Please refer to the end of the specification for access instructions.

Lengthy table referenced here
US20250108121A1-20250403-T00004
Please refer to the end of the specification for access instructions.

Lengthy table referenced here
US20250108121A1-20250403-T00005
Please refer to the end of the specification for access instructions.

Lengthy table referenced here
US20250108121A1-20250403-T00006
Please refer to the end of the specification for access instructions.

[0327] In one embodiment the antibody or fragment thereof comprises a light chain variable region comprising a sequence selected from the group consisting of SEQ ID NOs: 1-157 and a heavy chain variable region comprising a sequence selected from the group consisting of SEQ ID NOs: 158-314, wherein the antibody or functional fragment thereof comprises a cysteine or non-canonical amino acid amino acid substitution at one or more conjugation site(s) selected from the group consisting of D70 of the antibody light chain relative to reference sequence SEQ ID NO: 455, E276 of the antibody heavy chain relative to reference sequence SEQ ID NO: 612, and T363 of the antibody heavy chain relative to reference sequence SEQ ID NO: 612.

[0328] In one embodiment the antibody or fragment thereof comprises a combination of light chain variable region and a heavy chain variable region selected from the group consisting of a light chain variable region comprising SEQ ID NO: 1 and a heavy chain variable region comprising SEQ ID NO: 158; a light chain variable region comprising SEQ ID NO: 2 and a heavy chain variable region comprising SEQ ID NO: 159; a light chain variable region comprising SEQ ID NO: 3 and a heavy chain variable region comprising SEQ ID NO: 160; a light chain variable region comprising SEQ ID NO: 4 and a heavy chain variable region comprising SEQ ID NO: 161; a light chain variable region comprising SEQ ID NO: 5 and a heavy chain variable region comprising SEQ ID NO: 162; a light chain variable region comprising SEQ ID NO: 6 and a heavy chain variable region comprising SEQ ID NO: 163; a light chain variable region comprising SEQ ID NO: 7 and a heavy chain variable region comprising SEQ ID NO: 164; a light chain variable region comprising SEQ ID NO: 8 and a heavy chain variable region comprising SEQ ID NO: 165; a light chain variable region comprising SEQ ID NO: 9 and a heavy chain variable region comprising SEQ ID NO: 166; a light chain variable region comprising SEQ ID NO: 10 and a heavy chain variable region comprising SEQ ID NO: 167; a light chain variable region comprising SEQ ID NO: 11 and a heavy chain variable region comprising SEQ ID NO: 168; a light chain variable region comprising SEQ ID NO: 12 and a heavy chain variable region comprising SEQ ID NO: 169; a light chain variable region comprising SEQ ID NO: 13 and a heavy chain variable region comprising SEQ ID NO: 170; a light chain variable region comprising SEQ ID NO: 14 and a heavy chain variable region comprising SEQ ID NO: 171; a light chain variable region comprising SEQ ID NO: 15 and a heavy chain variable region comprising SEQ ID NO: 172; a light chain variable region comprising SEQ ID NO: 16 and a heavy chain variable region comprising SEQ ID NO: 173; a light chain variable region comprising SEQ ID NO: 17 and a heavy chain variable region comprising SEQ ID NO: 174; a light chain variable region comprising SEQ ID NO: 18 and a heavy chain variable region comprising SEQ ID NO: 175; a light chain variable region comprising SEQ ID NO: 19 and a heavy chain variable region comprising SEQ ID NO: 176; a light chain variable region comprising SEQ ID NO: 20 and a heavy chain variable region comprising SEQ ID NO: 177; a light chain variable region comprising SEQ ID NO: 21 and a heavy chain variable region comprising SEQ ID NO: 178; a light chain variable region comprising SEQ ID NO: 22 and a heavy chain variable region comprising SEQ ID NO: 179; a light chain variable region comprising SEQ ID NO: 23 and a 4W8 heavy chain variable region comprising SEQ ID NO: 180; a light chain variable region comprising SEQ ID NO: 24 and a heavy chain variable region comprising SEQ ID NO: 181; a light chain variable region comprising SEQ ID NO: 25 and a heavy chain variable region comprising SEQ ID NO: 182; a light chain variable region comprising SEQ ID NO: 26 and a heavy chain variable region comprising SEQ ID NO: 183; a light chain variable region comprising SEQ ID NO: 27 and a heavy chain variable region comprising SEQ ID NO: 184; a light chain variable region comprising SEQ ID NO: 28 and a heavy chain variable region comprising SEQ ID NO: 185; a light chain variable region comprising SEQ ID NO: 29 and a heavy chain variable region comprising SEQ ID NO: 186; a light chain variable region comprising SEQ ID NO: 30 and a heavy chain variable region comprising SEQ ID NO: 187; a light chain variable region comprising SEQ ID NO: 31 and a heavy chain variable region comprising SEQ ID NO: 188; a light chain variable region comprising SEQ ID NO: 32 and a heavy chain variable region comprising SEQ ID NO: 189; a light chain variable region comprising SEQ ID NO: 33 and a heavy chain variable region comprising SEQ ID NO: 190; a light chain variable region comprising SEQ ID NO: 34 and a heavy chain variable region comprising SEQ ID NO: 191; a light chain variable region comprising SEQ ID NO: 35 and a heavy chain variable region comprising SEQ ID NO: 192; a light chain variable region comprising SEQ ID NO: 36 and a heavy chain variable region comprising SEQ ID NO: 193; a light chain variable region comprising SEQ ID NO: 37 and a heavy chain variable region comprising SEQ ID NO: 194; a light chain variable region comprising SEQ ID NO: 38 and a heavy chain variable region comprising SEQ ID NO: 195; a light chain variable region comprising SEQ ID NO: 39 and a heavy chain variable region comprising SEQ ID NO: 196; a light chain variable region comprising SEQ ID NO: 40 and a heavy chain variable region comprising SEQ ID NO: 197; a light chain variable region comprising SEQ ID NO: 41 and a heavy chain variable region comprising SEQ ID NO: 198; a light chain variable region comprising SEQ ID NO: 42 and a heavy chain variable region comprising SEQ ID NO: 199; a light chain variable region comprising SEQ ID NO: 43 and a heavy chain variable region comprising SEQ ID NO: 200; a light chain variable region comprising SEQ ID NO: 44 and a heavy chain variable region comprising SEQ ID NO: 201; a light chain variable region comprising SEQ ID NO: 45 and a heavy chain variable region comprising SEQ ID NO: 202; a light chain variable region comprising SEQ ID NO: 46 and a heavy chain variable region comprising SEQ ID NO: 203; a light chain variable region comprising SEQ ID NO: 47 and a heavy chain variable region comprising SEQ ID NO: 204; a light chain variable region comprising SEQ ID NO: 48 and a heavy chain variable region comprising SEQ ID NO: 205; a light chain variable region comprising SEQ ID NO: 49 and a heavy chain variable region comprising SEQ ID NO: 206; a light chain variable region comprising SEQ ID NO: 50 and a heavy chain variable region comprising SEQ ID NO: 207; a light chain variable region comprising SEQ ID NO: 51 and a heavy chain variable region comprising SEQ ID NO: 208; a light chain variable region comprising SEQ ID NO: 52 and a heavy chain variable region comprising SEQ ID NO: 209; a light chain variable region comprising SEQ ID NO: 53 and a heavy chain variable region comprising SEQ ID NO: 210; a light chain variable region comprising SEQ ID NO: 54 and a heavy chain variable region comprising SEQ ID NO: 211; a light chain variable region comprising SEQ ID NO: 55 and a heavy chain variable region comprising SEQ ID NO: 212; a light chain variable region comprising SEQ ID NO: 56 and a heavy chain variable region comprising SEQ ID NO: 213; a light chain variable region comprising SEQ ID NO: 57 and a heavy chain variable region comprising SEQ ID NO: 214; a light chain variable region comprising SEQ ID NO: 58 and a heavy chain variable region comprising SEQ ID NO: 215; a light chain variable region comprising SEQ ID NO: 59 and a heavy chain variable region comprising SEQ ID NO: 216; a light chain variable region comprising SEQ ID NO: 60 and a heavy chain variable region comprising SEQ ID NO: 217; a light chain variable region comprising SEQ ID NO: 61 and a heavy chain variable region comprising SEQ ID NO: 218; a light chain variable region comprising SEQ ID NO: 62 and a heavy chain variable region comprising SEQ ID NO: 219; a light chain variable region comprising SEQ ID NO: 63 and a heavy chain variable region comprising SEQ ID NO: 220; a light chain variable region comprising SEQ ID NO: 64 and a heavy chain variable region comprising SEQ ID NO: 221; a light chain variable region comprising SEQ ID NO: 65 and a heavy chain variable region comprising SEQ ID NO: 222; a light chain variable region comprising SEQ ID NO: 66 and a heavy chain variable region comprising SEQ ID NO: 223; a light chain variable region comprising SEQ ID NO: 67 and a heavy chain variable region comprising SEQ ID NO: 224; a light chain variable region comprising SEQ ID NO: 68 and a heavy chain variable region comprising SEQ ID NO: 225; a light chain variable region comprising SEQ ID NO: 69 and a heavy chain variable region comprising SEQ ID NO: 226; a light chain variable region comprising SEQ ID NO: 70 and a heavy chain variable region comprising SEQ ID NO: 227; a light chain variable region comprising SEQ ID NO: 71 and a heavy chain variable region comprising SEQ ID NO: 228; a light chain variable region comprising SEQ ID NO: 72 and a heavy chain variable region comprising SEQ ID NO: 229; a light chain variable region comprising SEQ ID NO: 73 and a heavy chain variable region comprising SEQ ID NO: 230; a light chain variable region comprising SEQ ID NO: 74 and a heavy chain variable region comprising SEQ ID NO: 231; a light chain variable region comprising SEQ ID NO: 75 and a heavy chain variable region comprising SEQ ID NO: 232; a light chain variable region comprising SEQ ID NO: 76 and a heavy chain variable region comprising SEQ ID NO: 233; a light chain variable region comprising SEQ ID NO: 77 and a heavy chain variable region comprising SEQ ID NO: 234; a light chain variable region comprising SEQ ID NO: 78 and a heavy chain variable region comprising SEQ ID NO: 235; a light chain variable region comprising SEQ ID NO: 79 and a heavy chain variable region comprising SEQ ID NO: 236; a light chain variable region comprising SEQ ID NO: 80 and a heavy chain variable region comprising SEQ ID NO: 237; a light chain variable region comprising SEQ ID NO: 81 and a heavy chain variable region comprising SEQ ID NO: 238; a light chain variable region comprising SEQ ID NO: 82 and a heavy chain variable region comprising SEQ ID NO: 239; a light chain variable region comprising SEQ ID NO: 83 and a heavy chain variable region comprising SEQ ID NO: 240; a light chain variable region comprising SEQ ID NO: 84 and a heavy chain variable region comprising SEQ ID NO: 241; a light chain variable region comprising SEQ ID NO: 85 and a heavy chain variable region comprising SEQ ID NO: 242; a light chain variable region comprising SEQ ID NO: 86 and a heavy chain variable region comprising SEQ ID NO: 243; a light chain variable region comprising SEQ ID NO: 87 and a heavy chain variable region comprising SEQ ID NO: 244; a light chain variable region comprising SEQ ID NO: 88 and a heavy chain variable region comprising SEQ ID NO: 245; a light chain variable region comprising SEQ ID NO: 89 and a heavy chain variable region comprising SEQ ID NO: 246; a light chain variable region comprising SEQ ID NO: 90 and a heavy chain variable region comprising SEQ ID NO: 247; a light chain variable region comprising SEQ ID NO: 91 and a heavy chain variable region comprising SEQ ID NO: 248; a light chain variable region comprising SEQ ID NO: 92 and a heavy chain variable region comprising SEQ ID NO: 249; a light chain variable region comprising SEQ ID NO: 93 and a heavy chain variable region comprising SEQ ID NO: 250; a light chain variable region comprising SEQ ID NO: 94 and a heavy chain variable region comprising SEQ ID NO: 251; a light chain variable region comprising SEQ ID NO: 95 and a heavy chain variable region comprising SEQ ID NO: 252; a light chain variable region comprising SEQ ID NO: 96 and a heavy chain variable region comprising SEQ ID NO: 253; a light chain variable region comprising SEQ ID NO: 97 and a heavy chain variable region comprising SEQ ID NO: 254; a light chain variable region comprising SEQ ID NO: 98 and a heavy chain variable region comprising SEQ ID NO: 255; a light chain variable region comprising SEQ ID NO: 99 and a heavy chain variable region comprising SEQ ID NO: 256; a light chain variable region comprising SEQ ID NO: 100 and a heavy chain variable region comprising SEQ ID NO: 257; a light chain variable region comprising SEQ ID NO: 101 and a heavy chain variable region comprising SEQ ID NO: 258; a light chain variable region comprising SEQ ID NO: 102 and a heavy chain variable region comprising SEQ ID NO: 259; a light chain variable region comprising SEQ ID NO: 103 and a heavy chain variable region comprising SEQ ID NO: 260; a light chain variable region comprising SEQ ID NO: 104 and a heavy chain variable region comprising SEQ ID NO: 261; a light chain variable region comprising SEQ ID NO: 105 and a heavy chain variable region comprising SEQ ID NO: 262; a light chain variable region comprising SEQ ID NO: 106 and a heavy chain variable region comprising SEQ ID NO: 263; a light chain variable region comprising SEQ ID NO: 107 and a heavy chain variable region comprising SEQ ID NO: 264; a light chain variable region comprising SEQ ID NO: 108 and a heavy chain variable region comprising SEQ ID NO: 265; a light chain variable region comprising SEQ ID NO: 109 and a heavy chain variable region comprising SEQ ID NO: 266; a light chain variable region comprising SEQ ID NO: 110 and a heavy chain variable region comprising SEQ ID NO: 267; a light chain variable region comprising SEQ ID NO: 111 and a heavy chain variable region comprising SEQ ID NO: 268; a light chain variable region comprising SEQ ID NO: 112 and a heavy chain variable region comprising SEQ ID NO: 269; a light chain variable region comprising SEQ ID NO: 113 and a heavy chain variable region comprising SEQ ID NO: 270; a light chain variable region comprising SEQ ID NO: 114 and a heavy chain variable region comprising SEQ ID NO: 271; a light chain variable region comprising SEQ ID NO: 115 and a heavy chain variable region comprising SEQ ID NO: 272; a light chain variable region comprising SEQ ID NO: 116 and a heavy chain variable region comprising SEQ ID NO: 273; a light chain variable region comprising SEQ ID NO: 117 and a heavy chain variable region comprising SEQ ID NO: 274; a light chain variable region comprising SEQ ID NO: 118 and a heavy chain variable region comprising SEQ ID NO: 275; a light chain variable region comprising SEQ ID NO: 119 and a heavy chain variable region comprising SEQ ID NO: 276; a light chain variable region comprising SEQ ID NO: 120 and a heavy chain variable region comprising SEQ ID NO: 277; a light chain variable region comprising SEQ ID NO: 121 and a heavy chain variable region comprising SEQ ID NO: 278; a light chain variable region comprising SEQ ID NO: 122 and a heavy chain variable region comprising SEQ ID NO: 279; a light chain variable region comprising SEQ ID NO: 123 and a heavy chain variable region comprising SEQ ID NO: 280; a light chain variable region comprising SEQ ID NO: 124 and a heavy chain variable region comprising SEQ ID NO: 281; a light chain variable region comprising SEQ ID NO: 125 and a heavy chain variable region comprising SEQ ID NO: 282; a light chain variable region comprising SEQ ID NO: 126 and a heavy chain variable region comprising SEQ ID NO: 283; a light chain variable region comprising SEQ ID NO: 127 and a heavy chain variable region comprising SEQ ID NO: 284; a light chain variable region comprising SEQ ID NO: 128 and a heavy chain variable region comprising SEQ ID NO: 285; a light chain variable region comprising SEQ ID NO: 129 and a heavy chain variable region comprising SEQ ID NO: 286; a light chain variable region comprising SEQ ID NO: 130 and a heavy chain variable region comprising SEQ ID NO: 287; a light chain variable region comprising SEQ ID NO: 131 and a heavy chain variable region comprising SEQ ID NO: 288; a light chain variable region comprising SEQ ID NO: 132 and a heavy chain variable region comprising SEQ ID NO: 289; a light chain variable region comprising SEQ ID NO: 133 and a heavy chain variable region comprising SEQ ID NO: 290; a light chain variable region comprising SEQ ID NO: 134 and a heavy chain variable region comprising SEQ ID NO: 291; a light chain variable region comprising SEQ ID NO: 135 and a heavy chain variable region comprising SEQ ID NO: 292; a light chain variable region comprising SEQ ID NO: 136 and a heavy chain variable region comprising SEQ ID NO: 293; a light chain variable region comprising SEQ ID NO: 137 and a heavy chain variable region comprising SEQ ID NO: 294; a light chain variable region comprising SEQ ID NO: 138 and a heavy chain variable region comprising SEQ ID NO: 295; a light chain variable region comprising SEQ ID NO: 139 and a heavy chain variable region comprising SEQ ID NO: 296; a light chain variable region comprising SEQ ID NO: 140 and a heavy chain variable region comprising SEQ ID NO: 297; a light chain variable region comprising SEQ ID NO: 141 and a heavy chain variable region comprising SEQ ID NO: 298; a light chain variable region comprising SEQ ID NO: 142 and a heavy chain variable region comprising SEQ ID NO: 299; a light chain variable region comprising SEQ ID NO: 143 and a heavy chain variable region comprising SEQ ID NO: 300; a light chain variable region comprising SEQ ID NO: 144 and a heavy chain variable region comprising SEQ ID NO: 301; a light chain variable region comprising SEQ ID NO: 145 and a heavy chain variable region comprising SEQ ID NO: 302; a light chain variable region comprising SEQ ID NO: 146 and a heavy chain variable region comprising SEQ ID NO: 303; a light chain variable region comprising SEQ ID NO: 147 and a heavy chain variable region comprising SEQ ID NO: 304; a light chain variable region comprising SEQ ID NO: 148 and a heavy chain variable region comprising SEQ ID NO: 305; a light chain variable region comprising SEQ ID NO: 149 and a heavy chain variable region comprising SEQ ID NO: 306; a light chain variable region comprising SEQ ID NO: 150 and a heavy chain variable region comprising SEQ ID NO: 307; a light chain variable region comprising SEQ ID NO: 151 and a heavy chain variable region comprising SEQ ID NO: 308; a light chain variable region comprising SEQ ID NO: 152 and a heavy chain variable region comprising SEQ ID NO: 309; a light chain variable region comprising SEQ ID NO: 153 and a heavy chain variable region comprising SEQ ID NO: 310; a light chain variable region comprising SEQ ID NO: 154 and a heavy chain variable region comprising SEQ ID NO: 311; a light chain variable region comprising SEQ ID NO: 155 and a heavy chain variable region comprising SEQ ID NO: 312; a light chain variable region comprising SEQ ID NO: 156 and a heavy chain variable region comprising SEQ ID NO: 313; and a light chain variable region comprising SEQ ID NO: 157 and a heavy chain variable region comprising SEQ ID NO: 314, wherein the antibody or functional fragment thereof comprises a cysteine or non-canonical amino acid amino acid substitution at one or more conjugation site(s) selected from the group consisting of D70 of the antibody light chain relative to reference sequence SEQ ID NO: 455, E276 of the antibody heavy chain relative to reference sequence SEQ ID NO: 612, and T363 of the antibody heavy chain relative to reference sequence SEQ ID NO: 612.

[0329] In one embodiment the antibody or fragment thereof comprises a light chain variable region encoded by a polynucleotide sequence selected from the group consisting of SEQ ID NOs: 1571-1727 and a heavy chain variable region encoded by a polynucleotide sequence selected from the group consisting of SEQ ID NOs: 1728-1884, wherein the antibody or functional fragment thereof comprises a cysteine or non-canonical amino acid amino acid substitution at one or more conjugation site(s) selected from the group consisting of D70 of the antibody light chain relative to reference sequence SEQ ID NO: 455, E276 of the antibody heavy chain relative to reference sequence SEQ ID NO: 612, and T363 of the antibody heavy chain relative to reference sequence SEQ ID NO: 612.

[0330] In one embodiment the antibody or fragment thereof comprises a combination of light chain variable region and a heavy chain variable region selected from the group consisting of a light chain variable region encoded by a polynucleotide sequence comprising SEQ ID NO: 1571 and a heavy chain variable region encoded by a polynucleotide sequence comprising SEQ ID NO: 1728; a light chain variable region encoded by a polynucleotide sequence comprising SEQ ID NO: 1572 and a heavy chain variable region encoded by a polynucleotide sequence comprising SEQ ID NO: 1729; a light chain variable region encoded by a polynucleotide sequence comprising SEQ ID NO: 1573 and a heavy chain variable region encoded by a polynucleotide sequence comprising SEQ ID NO: 1730; a light chain variable region encoded by a polynucleotide sequence comprising SEQ ID NO: 1574 and a heavy chain variable region encoded by a polynucleotide sequence comprising SEQ ID NO: 1731; a light chain variable region encoded by a polynucleotide sequence comprising SEQ ID NO: 1575 and a heavy chain variable region encoded by a polynucleotide sequence comprising SEQ ID NO: 1732; a light chain variable region encoded by a polynucleotide sequence comprising SEQ ID NO: 1576 and a heavy chain variable region encoded by a polynucleotide sequence comprising SEQ ID NO: 1733; a light chain variable region encoded by a polynucleotide sequence comprising SEQ ID NO: 1577 and a heavy chain variable region encoded by a polynucleotide sequence comprising SEQ ID NO: 1734; a light chain variable region encoded by a polynucleotide sequence comprising SEQ ID NO: 1578 and a heavy chain variable region encoded by a polynucleotide sequence comprising SEQ ID NO: 1735; a light chain variable region encoded by a polynucleotide sequence comprising SEQ ID NO: 1579 and a heavy chain variable region encoded by a polynucleotide sequence comprising SEQ ID NO: 1736; a light chain variable region encoded by a polynucleotide sequence comprising SEQ ID NO: 1580 and a heavy chain variable region encoded by a polynucleotide sequence comprising SEQ ID NO: 1737; a light chain variable region encoded by a polynucleotide sequence comprising SEQ ID NO: 1581 and a heavy chain variable region encoded by a polynucleotide sequence comprising SEQ ID NO: 1738; a light chain variable region encoded by a polynucleotide sequence comprising SEQ ID NO: 1582 and a heavy chain variable region encoded by a polynucleotide sequence comprising SEQ ID NO: 1739; a light chain variable region encoded by a polynucleotide sequence comprising SEQ ID NO: 1583 and a heavy chain variable region encoded by a polynucleotide sequence comprising SEQ ID NO: 1740; a light chain variable region encoded by a polynucleotide sequence comprising SEQ ID NO: 1584 and a heavy chain variable region encoded by a polynucleotide sequence comprising SEQ ID NO: 1741; a light chain variable region encoded by a polynucleotide sequence comprising SEQ ID NO: 1585 and a heavy chain variable region encoded by a polynucleotide sequence comprising SEQ ID NO: 1742; a light chain variable region encoded by a polynucleotide sequence comprising SEQ ID NO: 1586 and a heavy chain variable region encoded by a polynucleotide sequence comprising SEQ ID NO: 1743; a light chain variable region encoded by a polynucleotide sequence comprising SEQ ID NO: 1587 and a heavy chain variable region encoded by a polynucleotide sequence comprising SEQ ID NO: 1744; a light chain variable region encoded by a polynucleotide sequence comprising SEQ ID NO: 1588 and a heavy chain variable region encoded by a polynucleotide sequence comprising SEQ ID NO: 1745; a light chain variable region encoded by a polynucleotide sequence comprising SEQ ID NO: 1589 and a heavy chain variable region encoded by a polynucleotide sequence comprising SEQ ID NO: 1746; a light chain variable region encoded by a polynucleotide sequence comprising SEQ ID NO: 1590 and a heavy chain variable region encoded by a polynucleotide sequence comprising SEQ ID NO: 1747; a light chain variable region encoded by a polynucleotide sequence comprising SEQ ID NO: 1591 and a heavy chain variable region encoded by a polynucleotide sequence comprising SEQ ID NO: 1748; a light chain variable region encoded by a polynucleotide sequence comprising SEQ ID NO: 1592 and a heavy chain variable region encoded by a polynucleotide sequence comprising SEQ ID NO: 1749; a light chain variable region encoded by a polynucleotide sequence comprising SEQ ID NO: 1593 and a heavy chain variable region encoded by a polynucleotide sequence comprising SEQ ID NO: 1750; a light chain variable region encoded by a polynucleotide sequence comprising SEQ ID NO: 1594 and a heavy chain variable region encoded by a polynucleotide sequence comprising SEQ ID NO: 1751; a light chain variable region encoded by a polynucleotide sequence comprising SEQ ID NO: 1595 and a heavy chain variable region encoded by a polynucleotide sequence comprising SEQ ID NO: 1752; a light chain variable region encoded by a polynucleotide sequence comprising SEQ ID NO: 1596 and a heavy chain variable region encoded by a polynucleotide sequence comprising SEQ ID NO: 1753; a light chain variable region encoded by a polynucleotide sequence comprising SEQ ID NO: 1597 and a heavy chain variable region encoded by a polynucleotide sequence comprising SEQ ID NO: 1754; a light chain variable region encoded by a polynucleotide sequence comprising SEQ ID NO: 1598 and a heavy chain variable region encoded by a polynucleotide sequence comprising SEQ ID NO: 1755; a light chain variable region encoded by a polynucleotide sequence comprising SEQ ID NO: 1599 and a heavy chain variable region encoded by a polynucleotide sequence comprising SEQ ID NO: 1756; a light chain variable region encoded by a polynucleotide sequence comprising SEQ ID NO: 1600 and a heavy chain variable region encoded by a polynucleotide sequence comprising SEQ ID NO: 1757; a light chain variable region encoded by a polynucleotide sequence comprising SEQ ID NO: 1601 and a heavy chain variable region encoded by a polynucleotide sequence comprising SEQ ID NO: 1758; a light chain variable region encoded by a polynucleotide sequence comprising SEQ ID NO: 1602 and a heavy chain variable region encoded by a polynucleotide sequence comprising SEQ ID NO: 1759; a light chain variable region encoded by a polynucleotide sequence comprising SEQ ID NO: 1603 and a heavy chain variable region encoded by a polynucleotide sequence comprising SEQ ID NO: 1760; a light chain variable region encoded by a polynucleotide sequence comprising SEQ ID NO: 1604 and a heavy chain variable region encoded by a polynucleotide sequence comprising SEQ ID NO: 1761; a light chain variable region encoded by a polynucleotide sequence comprising SEQ ID NO: 1605 and a heavy chain variable region encoded by a polynucleotide sequence comprising SEQ ID NO: 1762; a light chain variable region encoded by a polynucleotide sequence comprising SEQ ID NO: 1606 and a heavy chain variable region encoded by a polynucleotide sequence comprising SEQ ID NO: 1763; a light chain variable region encoded by a polynucleotide sequence comprising SEQ ID NO: 1607 and a heavy chain variable region encoded by a polynucleotide sequence comprising SEQ ID NO: 1764; a light chain variable region encoded by a polynucleotide sequence comprising SEQ ID NO: 1608 and a heavy chain variable region encoded by a polynucleotide sequence comprising SEQ ID NO: 1765; a light chain variable region encoded by a polynucleotide sequence comprising SEQ ID NO: 1609 and a heavy chain variable region encoded by a polynucleotide sequence comprising SEQ ID NO: 1766; a light chain variable region encoded by a polynucleotide sequence comprising SEQ ID NO: 1610 and a heavy chain variable region encoded by a polynucleotide sequence comprising SEQ ID NO: 1767; a light chain variable region encoded by a polynucleotide sequence comprising SEQ ID NO: 1611 and a heavy chain variable region encoded by a polynucleotide sequence comprising SEQ ID NO: 1768; a light chain variable region encoded by a polynucleotide sequence comprising SEQ ID NO: 1612 and a heavy chain variable region encoded by a polynucleotide sequence comprising SEQ ID NO: 1769; a light chain variable region encoded by a polynucleotide sequence comprising SEQ ID NO: 1613 and a heavy chain variable region encoded by a polynucleotide sequence comprising SEQ ID NO: 1770; a light chain variable region encoded by a polynucleotide sequence comprising SEQ ID NO: 1614 and a heavy chain variable region encoded by a polynucleotide sequence comprising SEQ ID NO: 1771; a light chain variable region encoded by a polynucleotide sequence comprising SEQ ID NO: 1615 and a heavy chain variable region encoded by a polynucleotide sequence comprising SEQ ID NO: 1772; a light chain variable region encoded by a polynucleotide sequence comprising SEQ ID NO: 1616 and a heavy chain variable region encoded by a polynucleotide sequence comprising SEQ ID NO: 1773; a light chain variable region encoded by a polynucleotide sequence comprising SEQ ID NO: 1617 and a heavy chain variable region encoded by a polynucleotide sequence comprising SEQ ID NO: 1774; a light chain variable region encoded by a polynucleotide sequence comprising SEQ ID NO: 1618 and a heavy chain variable region encoded by a polynucleotide sequence comprising SEQ ID NO: 1775; a light chain variable region encoded by a polynucleotide sequence comprising SEQ ID NO: 1619 and a heavy chain variable region encoded by a polynucleotide sequence comprising SEQ ID NO: 1776; a light chain variable region encoded by a polynucleotide sequence comprising SEQ ID NO: 1620 and a heavy chain variable region encoded by a polynucleotide sequence comprising SEQ ID NO: 1777; a light chain variable region encoded by a polynucleotide sequence comprising SEQ ID NO: 1621 and a heavy chain variable region encoded by a polynucleotide sequence comprising SEQ ID NO: 1778; a light chain variable region encoded by a polynucleotide sequence comprising SEQ ID NO: 1622 and a heavy chain variable region encoded by a polynucleotide sequence comprising SEQ ID NO: 1779; a light chain variable region encoded by a polynucleotide sequence comprising SEQ ID NO: 1623 and a heavy chain variable region encoded by a polynucleotide sequence comprising SEQ ID NO: 1780; a light chain variable region encoded by a polynucleotide sequence comprising SEQ ID NO: 1624 and a heavy chain variable region encoded by a polynucleotide sequence comprising SEQ ID NO: 1781; a light chain variable region encoded by a polynucleotide sequence comprising SEQ ID NO: 1625 and a heavy chain variable region encoded by a polynucleotide sequence comprising SEQ ID NO: 1782; a light chain variable region encoded by a polynucleotide sequence comprising SEQ ID NO: 1626 and a heavy chain variable region encoded by a polynucleotide sequence comprising SEQ ID NO: 1783; a light chain variable region encoded by a polynucleotide sequence comprising SEQ ID NO: 1627 and a heavy chain variable region encoded by a polynucleotide sequence comprising SEQ ID NO: 1784; a light chain variable region encoded by a polynucleotide sequence comprising SEQ ID NO: 1628 and a heavy chain variable region encoded by a polynucleotide sequence comprising SEQ ID NO: 1785; a light chain variable region encoded by a polynucleotide sequence comprising SEQ ID NO: 1629 and a heavy chain variable region encoded by a polynucleotide sequence comprising SEQ ID NO: 1786; a light chain variable region encoded by a polynucleotide sequence comprising SEQ ID NO: 1630 and a heavy chain variable region encoded by a polynucleotide sequence comprising SEQ ID NO: 1787; a light chain variable region encoded by a polynucleotide sequence comprising SEQ ID NO: 1631 and a heavy chain variable region encoded by a polynucleotide sequence comprising SEQ ID NO: 1788; a light chain variable region encoded by a polynucleotide sequence comprising SEQ ID NO: 1632 and a heavy chain variable region encoded by a polynucleotide sequence comprising SEQ ID NO: 1789; a light chain variable region encoded by a polynucleotide sequence comprising SEQ ID NO: 1633 and a heavy chain variable region encoded by a polynucleotide sequence comprising SEQ ID NO: 1790; a light chain variable region encoded by a polynucleotide sequence comprising SEQ ID NO: 1634 and a heavy chain variable region encoded by a polynucleotide sequence comprising SEQ ID NO: 1791; a light chain variable region encoded by a polynucleotide sequence comprising SEQ ID NO: 1635 and a heavy chain variable region encoded by a polynucleotide sequence comprising SEQ ID NO: 1792; a light chain variable region encoded by a polynucleotide sequence comprising SEQ ID NO: 1636 and a heavy chain variable region encoded by a polynucleotide sequence comprising SEQ ID NO: 1793; a light chain variable region encoded by a polynucleotide sequence comprising SEQ ID NO: 1637 and a heavy chain variable region encoded by a polynucleotide sequence comprising SEQ ID NO: 1794; a light chain variable region encoded by a polynucleotide sequence comprising SEQ ID NO: 1638 and a heavy chain variable region encoded by a polynucleotide sequence comprising SEQ ID NO: 1795; a light chain variable region encoded by a polynucleotide sequence comprising SEQ ID NO: 1639 and a heavy chain variable region encoded by a polynucleotide sequence comprising SEQ ID NO: 1796; a light chain variable region encoded by a polynucleotide sequence comprising SEQ ID NO: 1640 and a heavy chain variable region encoded by a polynucleotide sequence comprising SEQ ID NO: 1797; a light chain variable region encoded by a polynucleotide sequence comprising SEQ ID NO: 1641 and a heavy chain variable region encoded by a polynucleotide sequence comprising SEQ ID NO: 1798; a light chain variable region encoded by a polynucleotide sequence comprising SEQ ID NO: 1642 and a heavy chain variable region encoded by a polynucleotide sequence comprising SEQ ID NO: 1799; a light chain variable region encoded by a polynucleotide sequence comprising SEQ ID NO: 1643 and a heavy chain variable region encoded by a polynucleotide sequence comprising SEQ ID NO: 1800; a light chain variable region encoded by a polynucleotide sequence comprising SEQ ID NO: 1644 and a heavy chain variable region encoded by a polynucleotide sequence comprising SEQ ID NO: 1801; a light chain variable region encoded by a polynucleotide sequence comprising SEQ ID NO: 1645 and a heavy chain variable region encoded by a polynucleotide sequence comprising SEQ ID NO: 1802; a light chain variable region encoded by a polynucleotide sequence comprising SEQ ID NO: 1646 and a heavy chain variable region encoded by a polynucleotide sequence comprising SEQ ID NO: 1803; a light chain variable region encoded by a polynucleotide sequence comprising SEQ ID NO: 1647 and a heavy chain variable region encoded by a polynucleotide sequence comprising SEQ ID NO: 1804; a light chain variable region encoded by a polynucleotide sequence comprising SEQ ID NO: 1648 and a heavy chain variable region encoded by a polynucleotide sequence comprising SEQ ID NO: 1805; a light chain variable region encoded by a polynucleotide sequence comprising SEQ ID NO: 1649 and a heavy chain variable region encoded by a polynucleotide sequence comprising SEQ ID NO: 1806; a light chain variable region encoded by a polynucleotide sequence comprising SEQ ID NO: 1650 and a heavy chain variable region encoded by a polynucleotide sequence comprising SEQ ID NO: 1807; a light chain variable region encoded by a polynucleotide sequence comprising SEQ ID NO: 1651 and a heavy chain variable region encoded by a polynucleotide sequence comprising SEQ ID NO: 1808; a light chain variable region encoded by a polynucleotide sequence comprising SEQ ID NO: 1652 and a heavy chain variable region encoded by a polynucleotide sequence comprising SEQ ID NO: 1809; a light chain variable region encoded by a polynucleotide sequence comprising SEQ ID NO: 1653 and a heavy chain variable region encoded by a polynucleotide sequence comprising SEQ ID NO: 1810; a light chain variable region encoded by a polynucleotide sequence comprising SEQ ID NO: 1654 and a heavy chain variable region encoded by a polynucleotide sequence comprising SEQ ID NO: 1811; a light chain variable region encoded by a polynucleotide sequence comprising SEQ ID NO: 1655 and a heavy chain variable region encoded by a polynucleotide sequence comprising SEQ ID NO: 1812; a light chain variable region encoded by a polynucleotide sequence comprising SEQ ID NO: 1656 and a heavy chain variable region encoded by a polynucleotide sequence comprising SEQ ID NO: 1813; a light chain variable region encoded by a polynucleotide sequence comprising SEQ ID NO: 1657 and a heavy chain variable region encoded by a polynucleotide sequence comprising SEQ ID NO: 1814; a light chain variable region encoded by a polynucleotide sequence comprising SEQ ID NO: 1658 and a heavy chain variable region encoded by a polynucleotide sequence comprising SEQ ID NO: 1815; a light chain variable region encoded by a polynucleotide sequence comprising SEQ ID NO: 1659 and a heavy chain variable region encoded by a polynucleotide sequence comprising SEQ ID NO: 1816; a light chain variable region encoded by a polynucleotide sequence comprising SEQ ID NO: 1660 and a heavy chain variable region encoded by a polynucleotide sequence comprising SEQ ID NO: 1817; a light chain variable region encoded by a polynucleotide sequence comprising SEQ ID NO: 1661 and a heavy chain variable region encoded by a polynucleotide sequence comprising SEQ ID NO: 1818; a light chain variable region encoded by a polynucleotide sequence comprising SEQ ID NO: 1662 and a heavy chain variable region encoded by a polynucleotide sequence comprising SEQ ID NO: 1819; a light chain variable region encoded by a polynucleotide sequence comprising SEQ ID NO: 1663 and a heavy chain variable region encoded by a polynucleotide sequence comprising SEQ ID NO: 1820; a light chain variable region encoded by a polynucleotide sequence comprising SEQ ID NO: 1664 and a heavy chain variable region encoded by a polynucleotide sequence comprising SEQ ID NO: 1821; a light chain variable region encoded by a polynucleotide sequence comprising SEQ ID NO: 1665 and a heavy chain variable region encoded by a polynucleotide sequence comprising SEQ ID NO: 1822; a light chain variable region encoded by a polynucleotide sequence comprising SEQ ID NO: 1666 and a heavy chain variable region encoded by a polynucleotide sequence comprising SEQ ID NO: 1823; a light chain variable region encoded by a polynucleotide sequence comprising SEQ ID NO: 1667 and a heavy chain variable region encoded by a polynucleotide sequence comprising SEQ ID NO: 1824; a light chain variable region encoded by a polynucleotide sequence comprising SEQ ID NO: 1668 and a heavy chain variable region encoded by a polynucleotide sequence comprising SEQ ID NO: 1825; a light chain variable region encoded by a polynucleotide sequence comprising SEQ ID NO: 1669 and a heavy chain variable region encoded by a polynucleotide sequence comprising SEQ ID NO: 1826; a light chain variable region encoded by a polynucleotide sequence comprising SEQ ID NO: 1670 and a heavy chain variable region encoded by a polynucleotide sequence comprising SEQ ID NO: 1827; a light chain variable region encoded by a polynucleotide sequence comprising SEQ ID NO: 1671 and a heavy chain variable region encoded by a polynucleotide sequence comprising SEQ ID NO: 1828; a light chain variable region encoded by a polynucleotide sequence comprising SEQ ID NO: 1672 and a heavy chain variable region encoded by a polynucleotide sequence comprising SEQ ID NO: 1829; a light chain variable region encoded by a polynucleotide sequence comprising SEQ ID NO: 1673 and a heavy chain variable region encoded by a polynucleotide sequence comprising SEQ ID NO: 1830; a light chain variable region encoded by a polynucleotide sequence comprising SEQ ID NO: 1674 and a heavy chain variable region encoded by a polynucleotide sequence comprising SEQ ID NO: 1831; a light chain variable region encoded by a polynucleotide sequence comprising SEQ ID NO: 1675 and a heavy chain variable region encoded by a polynucleotide sequence comprising SEQ ID NO: 1832; a light chain variable region encoded by a polynucleotide sequence comprising SEQ ID NO: 1676 and a heavy chain variable region encoded by a polynucleotide sequence comprising SEQ ID NO: 1833; a light chain variable region encoded by a polynucleotide sequence comprising SEQ ID NO: 1677 and a heavy chain variable region encoded by a polynucleotide sequence comprising SEQ ID NO: 1834; a light chain variable region encoded by a polynucleotide sequence comprising SEQ ID NO: 1678 and a heavy chain variable region encoded by a polynucleotide sequence comprising SEQ ID NO: 1835; a light chain variable region encoded by a polynucleotide sequence comprising SEQ ID NO: 1679 and a heavy chain variable region encoded by a polynucleotide sequence comprising SEQ ID NO: 1836; a light chain variable region encoded by a polynucleotide sequence comprising SEQ ID NO: 1680 and a heavy chain variable region encoded by a polynucleotide sequence comprising SEQ ID NO: 1837; a light chain variable region encoded by a polynucleotide sequence comprising SEQ ID NO: 1681 and a heavy chain variable region encoded by a polynucleotide sequence comprising SEQ ID NO: 1838; a light chain variable region encoded by a polynucleotide sequence comprising SEQ ID NO: 1682 and a heavy chain variable region encoded by a polynucleotide sequence comprising SEQ ID NO: 1839; a light chain variable region encoded by a polynucleotide sequence comprising SEQ ID NO: 1683 and a heavy chain variable region encoded by a polynucleotide sequence comprising SEQ ID NO: 1840; a light chain variable region encoded by a polynucleotide sequence comprising SEQ ID NO: 1684 and a heavy chain variable region encoded by a polynucleotide sequence comprising SEQ ID NO: 1841; a light chain variable region encoded by a polynucleotide sequence comprising SEQ ID NO: 1685 and a heavy chain variable region encoded by a polynucleotide sequence comprising SEQ ID NO: 1842; a light chain variable region encoded by a polynucleotide sequence comprising SEQ ID NO: 1686 and a heavy chain variable region encoded by a polynucleotide sequence comprising SEQ ID NO: 1843; a light chain variable region encoded by a polynucleotide sequence comprising SEQ ID NO: 1687 and a heavy chain variable region encoded by a polynucleotide sequence comprising SEQ ID NO: 1844; a light chain variable region encoded by a polynucleotide sequence comprising SEQ ID NO: 1688 and a heavy chain variable region encoded by a polynucleotide sequence comprising SEQ ID NO: 1845; a light chain variable region encoded by a polynucleotide sequence comprising SEQ ID NO: 1689 and a heavy chain variable region encoded by a polynucleotide sequence comprising SEQ ID NO: 1846; a light chain variable region encoded by a polynucleotide sequence comprising SEQ ID NO: 1690 and a heavy chain variable region encoded by a polynucleotide sequence comprising SEQ ID NO: 1847; a light chain variable region encoded by a polynucleotide sequence comprising SEQ ID NO: 1691 and a heavy chain variable region encoded by a polynucleotide sequence comprising SEQ ID NO: 1848; a light chain variable region encoded by a polynucleotide sequence comprising SEQ ID NO: 1692 and a heavy chain variable region encoded by a polynucleotide sequence comprising SEQ ID NO: 1849; a light chain variable region encoded by a polynucleotide sequence comprising SEQ ID NO: 1693 and a heavy chain variable region encoded by a polynucleotide sequence comprising SEQ ID NO: 1850; a light chain variable region encoded by a polynucleotide sequence comprising SEQ ID NO: 1694 and a heavy chain variable region encoded by a polynucleotide sequence comprising SEQ ID NO: 1851; a light chain variable region encoded by a polynucleotide sequence comprising SEQ ID NO: 1695 and a heavy chain variable region encoded by a polynucleotide sequence comprising SEQ ID NO: 1852; a light chain variable region encoded by a polynucleotide sequence comprising SEQ ID NO: 1696 and a heavy chain variable region encoded by a polynucleotide sequence comprising SEQ ID NO: 1853; a light chain variable region encoded by a polynucleotide sequence comprising SEQ ID NO: 1697 and a heavy chain variable region encoded by a polynucleotide sequence comprising SEQ ID NO: 1854; a light chain variable region encoded by a polynucleotide sequence comprising SEQ ID NO: 1698 and a heavy chain variable region encoded by a polynucleotide sequence comprising SEQ ID NO: 1855; a light chain variable region encoded by a polynucleotide sequence comprising SEQ ID NO: 1699 and a heavy chain variable region encoded by a polynucleotide sequence comprising SEQ ID NO: 1856; a light chain variable region encoded by a polynucleotide sequence comprising SEQ ID NO: 1700 and a heavy chain variable region encoded by a polynucleotide sequence comprising SEQ ID NO: 1857; a light chain variable region encoded by a polynucleotide sequence comprising SEQ ID NO: 1701 and a heavy chain variable region encoded by a polynucleotide sequence comprising SEQ ID NO: 1858; a light chain variable region encoded by a polynucleotide sequence comprising SEQ ID NO: 1702 and a heavy chain variable region encoded by a polynucleotide sequence comprising SEQ ID NO: 1859; a light chain variable region encoded by a polynucleotide sequence comprising SEQ ID NO: 1703 and a heavy chain variable region encoded by a polynucleotide sequence comprising SEQ ID NO: 1860; a light chain variable region encoded by a polynucleotide sequence comprising SEQ ID NO: 1704 and a heavy chain variable region encoded by a polynucleotide sequence comprising SEQ ID NO: 1861; a light chain variable region encoded by a polynucleotide sequence comprising SEQ ID NO: 1705 and a heavy chain variable region encoded by a polynucleotide sequence comprising SEQ ID NO: 1862; a light chain variable region encoded by a polynucleotide sequence comprising SEQ ID NO: 1706 and a heavy chain variable region encoded by a polynucleotide sequence comprising SEQ ID NO: 1863; a light chain variable region encoded by a polynucleotide sequence comprising SEQ ID NO: 1707 and a heavy chain variable region encoded by a polynucleotide sequence comprising SEQ ID NO: 1864; a light chain variable region encoded by a polynucleotide sequence comprising SEQ ID NO: 1708 and a heavy chain variable region encoded by a polynucleotide sequence comprising SEQ ID NO: 1865; a light chain variable region encoded by a polynucleotide sequence comprising SEQ ID NO: 1709 and a heavy chain variable region encoded by a polynucleotide sequence comprising SEQ ID NO: 1866; a light chain variable region encoded by a polynucleotide sequence comprising SEQ ID NO: 1710 and a heavy chain variable region encoded by a polynucleotide sequence comprising SEQ ID NO: 1867; a light chain variable region encoded by a polynucleotide sequence comprising SEQ ID NO: 1711 and a heavy chain variable region encoded by a polynucleotide sequence comprising SEQ ID NO: 1868; a light chain variable region encoded by a polynucleotide sequence comprising SEQ ID NO: 1712 and a heavy chain variable region encoded by a polynucleotide sequence comprising SEQ ID NO: 1869; a light chain variable region encoded by a polynucleotide sequence comprising SEQ ID NO: 1713 and a heavy chain variable region encoded by a polynucleotide sequence comprising SEQ ID NO: 1870; a light chain variable region encoded by a polynucleotide sequence comprising SEQ ID NO: 1714 and a heavy chain variable region encoded by a polynucleotide sequence comprising SEQ ID NO: 1871; a light chain variable region encoded by a polynucleotide sequence comprising SEQ ID NO: 1715 and a heavy chain variable region encoded by a polynucleotide sequence comprising SEQ ID NO: 1872; a light chain variable region encoded by a polynucleotide sequence comprising SEQ ID NO: 1716 and a heavy chain variable region encoded by a polynucleotide sequence comprising SEQ ID NO: 1873; a light chain variable region encoded by a polynucleotide sequence comprising SEQ ID NO: 1717 and a heavy chain variable region encoded by a polynucleotide sequence comprising SEQ ID NO: 1874; a light chain variable region encoded by a polynucleotide sequence comprising SEQ ID NO: 1718 and a heavy chain variable region encoded by a polynucleotide sequence comprising SEQ ID NO: 1875; a light chain variable region encoded by a polynucleotide sequence comprising SEQ ID NO: 1719 and a heavy chain variable region encoded by a polynucleotide sequence comprising SEQ ID NO: 1876; a light chain variable region encoded by a polynucleotide sequence comprising SEQ ID NO: 1720 and a heavy chain variable region encoded by a polynucleotide sequence comprising SEQ ID NO: 1877; a light chain variable region encoded by a polynucleotide sequence comprising SEQ ID NO: 1721 and a heavy chain variable region encoded by a polynucleotide sequence comprising SEQ ID NO: 1878; a light chain variable region encoded by a polynucleotide sequence comprising SEQ ID NO: 1722 and a heavy chain variable region encoded by a polynucleotide sequence comprising SEQ ID NO: 1879; a light chain variable region encoded by a polynucleotide sequence comprising SEQ ID NO: 1723 and a heavy chain variable region encoded by a polynucleotide sequence comprising SEQ ID NO: 1880; a light chain variable region encoded by a polynucleotide sequence comprising SEQ ID NO: 1724 and a heavy chain variable region encoded by a polynucleotide sequence comprising SEQ ID NO: 1881; a light chain variable region encoded by a polynucleotide sequence comprising SEQ ID NO: 1725 and a heavy chain variable region encoded by a polynucleotide sequence comprising SEQ ID NO: 1882; a light chain variable region encoded by a polynucleotide sequence comprising SEQ ID NO: 1726 and a heavy chain variable region encoded by a polynucleotide sequence comprising SEQ ID NO: 1883; and a light chain variable region encoded by a polynucleotide sequence comprising SEQ ID NO: 1727 and a heavy chain variable region encoded by a polynucleotide sequence comprising SEQ ID NO: 1884, wherein the antibody or functional fragment thereof comprises a cysteine or non-canonical amino acid amino acid substitution at one or more conjugation site(s) selected from the group consisting of D70 of the antibody light chain relative to reference sequence SEQ ID NO: 455, E276 of the antibody heavy chain relative to reference sequence SEQ ID NO: 612, and T363 of the antibody heavy chain relative to reference sequence SEQ ID NO: 612.

[0331] The present invention relates to a composition comprising an anti-GIPR antigen binding protein having at least one conjugation site. The conjugation site must be amenable to conjugation of an additional functional moiety (e.g., a GLP-1 receptor agonist) by a defined conjugation chemistry through the side chain of an amino acid residue at the conjugation site. Achieving highly selective, site-specific conjugation to the anti-GIPR antigen binding protein, in accordance with the present invention, requires consideration of a diverse variety of design criteria. First, a preferred conjugation or coupling chemistry must be defined or predetermined. Functional moieties such as, GLP-1 receptor agonists, can be conjugated or coupled to the selected conjugation site of the anti-GIPR antigen binding protein through an assortment of different conjugation chemistries known in the art. For example, a maleimide-activated conjugation partner targeting an accessible cysteine thiol on the anti-GIPR antigen binding protein is one embodiment, but numerous conjugation or coupling chemistries targeting the side chains of either canonical or non-canonical, e.g., unnatural amino acids in the anti-GIPR antigen binding protein sequence, can be employed in accordance with the present invention.

[0332] Chemistries for the chemoselective conjugation include: copper(I)-catalyzed azide-alkyne [3+2]dipolar cycloadditions, Staudinger ligation, other acyl transfers processes (S→N; X→N), oximations, hydrazone bonding formation and other suitable organic chemistry reactions such as cross-couplings using water-soluble palladium catalysts. (E.g., Bong et al., Chemoselective Pd(0)-catalyzed peptide coupling in water, Organic Letters 3(16):2509-11 (2001); Dibowski et al., Bioconjugation of peptides by palladium-catalyzed C-C cross-coupling in water, Angew. Chem. Int. Ed. 37(4):476-78 (1998); DeVasher et al., Aqueous-phase, palladium-catalyzed cross-coupling of aryl bromides under mild conditions, using water-soluble, sterically demanding alkylphosphines, J. Org. Chem. 69:7919-27 (2004); Shaugnessy et al., J. Org. Chem, 2003, 68, 6767-6774; Prescher, J A and Bertozzi C R, Chemistry in living system, Nature Chemical Biology 1(1); 13-21 (2005)).

[0333] As mentioned above, the conjugation (or covalent binding) to the anti-GIPR antigen binding protein is through the side chain of an amino acid residue at the conjugation site, for example, but not limited to, a cysteinyl residue. The amino acid residue, for example, a cysteinyl residue, at the internal conjugation site that is selected can be one that occupies the same amino acid residue position in a native Fc domain sequence, or the amino acid residue can be engineered into the Fc domain sequence by substitution or insertion.

[0334] Other examples of unnatural amino acid residues that can be particularly useful as the conjugation site in some embodiments of the inventive processes and compositions of matter include: azido-containing amino acid residues, e.g., azidohomoalanine, p-azido-phenylalanine; keto-containing amino acid residues, e.g., p-acetyl-phenylalanine; alkyne-containing amino acid residues, e.g., p-ethynylphenylalanine, homopropargylglycine, p-(prop-2-ynyl)-tyrosine; alkene-containing amino acid residues e.g., homoallylglycine; aryl halide- containing amino acid residues e.g. p-iodophenylalanine, p-bromophenylalanine; and 1,2-aminothiol containing amino acid residues.

[0335] The non-canonical amino acid residues can be incorporated by amino acid substitution or insertion. Non-canonical amino acid residues can be incorporated into the peptide by chemical peptide synthesis rather than by synthesis in biological systems, such as recombinantly expressing cells, or alternatively the skilled artisan can employ known techniques of protein engineering that use recombinantly expressing cells. (See, e.g., Link et al., Non-canonical amino acids in protein engineering, Current Opinion in Biotechnology, 14(6):603-609 (2003); Schultz et al., In vivo incorporation of unnatural amino acids, U.S. Pat. No. 7,045,337).

[0336] The selection of the placement of the conjugation site in the overall anti-GIPR antigen binding protein is another important facet of selecting an internal conjugation site in accordance with the present invention. Any of the exposed amino acid residues on the anti-GIPR antigen binding protein can be potentially useful conjugation sites and can be mutated to cysteine or some other reactive amino acid for site-selective coupling, if not already present at the selected conjugation site of the anti-GIPR antigen binding protein sequence. However, this approach does not take into account potential steric constraints that may perturb the activity of the conjugated partner or limit the reactivity of the engineered mutation.

[0337] In one embodiment, the anti-GIPR antigen binding protein is an antibody or functional fragment thereof. In one embodiment, the anti-GIPR antibody or functional fragment thereof comprises a cysteine or non-canonical amino acid amino acid substitution at one or more conjugation site(s). The conjugation site(s) can be essentially on any residue of the antigen binding protein. In certain embodiments the conjugation site is located within the CL, CHI, CH2 or CH3 region of an antibody or functional fragment thereof. In certain embodiments the conjugation site(s) are selected from the group consisting of D70 of the antibody light chain relative to reference sequence SEQ ID NO: 455; E276 of the antibody heavy chain relative to reference sequence SEQ ID NO: 612; and T363 of the antibody heavy chain relative to reference sequence SEQ ID NO: 612. For sake of clarity, “D70 of the antibody light chain relative to reference sequence SEQ ID NO: 455” is the same substitution site as AHo position D88 of the light chain of antibody 5G12.006 and Kabat position D70 of the light chain of antibody 5G12.006; “E276 of the antibody heavy chain relative to reference sequence SEQ ID NO: 612” is the same substitution site as AHo position E384 of the heavy chain of antibody 5G12.006 and Kabat position E285 of the heavy chain of antibody 5G12.006; and “T363 of the antibody heavy chain relative to reference sequence SEQ ID NO: 612” is the same substitution site as AHo position T487 of the heavy chain of antibody 5G12.006 and Kabat position T382 of the heavy chain of antibody 5G12.006.

[0338] Some antigen binding proteins comprise a variable light domain and a variable heavy domain as listed in one of the rows for one of the antibodies listed in TABLE 3. In some instances, the antigen binding protein comprises two identical variable light domains and two identical variable heavy domains from one of the antibodies listed in TABLE 3. Some antigen binding proteins that are provided comprise a variable light domain and a variable heavy domain as listed in one of the rows for one of the antibodies listed in TABLE 3, except that one or both of the domains differs from the sequence specified in the table at only 1, 2, 3, 4, 5, 6, 7, 8, 9, 10, 11, 12, 13, 14 or 15 amino acid residues, wherein each such sequence difference is independently either a single amino acid deletion, insertion or substitution, with the deletions, insertions and/or substitutions resulting in no more than 1, 2, 3, 4, 5, 6, 7, 8, 9, 10, 11, 12, 13, 14 or 15 amino acid changes relative to the variable domain sequences specified in TABLE 3. In one embodiment, the antigen binding protein comprises a variable region sequence from Table 3, but with the N-terminal methionine deleted. Other antigen binding proteins also comprise a variable light domain and a variable heavy domain as listed in one of the rows for one of the antibodies listed in TABLE 3, except that one or both of the domains differs from the sequence specified in the table in that the heavy chain variable domain and/or light chain variable domain comprises or consists of a sequence of amino acids that has at least 70%, 75%, 80%, 85%, 90%, 95%, 96%, 97%, 98%, or 99% sequence identity to the amino acid sequences of the heavy chain variable domain or light chain variable domain sequences as specified in TABLE 3.

[0339] In another aspect, the antigen binding protein consists just of a variable light or variable heavy domain from an antibody listed in TABLE 3. In still another aspect, the antigen binding protein comprises two or more of the same variable heavy domains or two or more of the same variable light domains from those listed in TABLE 3. Such domain antibodies can be fused together or joined via a linker as described in greater detail below. The domain antibodies can also be fused or linked to one or more molecules to extend the half-life (e.g., PEG or albumin).

[0340] Other antigen binding proteins that are provided are variants of antibodies formed by combination of the heavy and light chains shown in TABLE 3 and comprise light and/or heavy chains that each have at least 70%, 75%, 80%, 85%, 90%, 95%, 96%, 97%, 98% or 99% identity to the amino acid sequences of these chains. In some instances, such antibodies include at least one heavy chain and one light chain, whereas in other instances the variant forms contain two identical light chains and two identical heavy chains.

[0341] The various combinations of heavy chain variable regions may be combined with any of the various combinations of light chain variable regions.

[0342] In a further embodiment, the isolated antigen binding protein provided herein is a human antibody comprising a sequence as set forth in TABLE 3 and is of the IgG₁-, IgG₂- IgG₃- or IgG4-type.

[0343] The antigen binding proteins disclosed herein are polypeptides into which one or more CDRs are grafted, inserted and/or joined. An antigen binding protein can have 1, 2, 3, 4, 5 or 6 CDRs. An antigen binding protein thus can have, for example, one heavy chain CDR1 (“CDRH1”), and/or one heavy chain CDR2 (“CDRH2”), and/or one heavy chain CDR3 (“CDRH3”), and/or one light chain CDR1 (“CDRL1”), and/or one light chain CDR2 (“CDRL2”), and/or one light chain CDR3 (“CDRL3”). Some antigen binding proteins include both a CDRH3 and a CDRL3. Specific light and heavy chain CDRs are identified in TABLEs 4A and 4B, respectively.

[0344] Complementarity determining regions (CDRs) and framework regions (FR) of a given antibody may be identified using the system described by Kabat et al. in Sequences of Proteins of Immunological Interest, 5th Ed., US Dept. of Health and Human Services, PHS, NIH, NIH Publication no. 91-3242, 1991. Certain antibodies that are disclosed herein comprise one or more amino acid sequences that are identical or have substantial sequence identity to the amino acid sequences of one or more of the CDRs presented in TABLES 4A and 4B. These CDRs use the system described by Kabat et al. as noted above.

[0345] The structure and properties of CDRs within a naturally occurring antibody has been described, supra. Briefly, in a traditional antibody, the CDRs are embedded within a framework in the heavy and light chain variable region where they constitute the regions responsible for antigen binding and recognition. A variable region comprises at least three heavy or light chain CDRs, see, supra (Kabat et al., 1991, Sequences of Proteins of Immunological Interest, Public Health Service N.I.H., Bethesda, MD; see also Chothia and Lesk, 1987, J. Mol. Biol. 196:901-917; Chothia et al., 1989, Nature 42: 877-883), within a framework region (designated framework regions 1-4, FR1, FR2, FR3, and FR4, by Kabat et al., 1991, supra; see also Chothia and Lesk, 1987, supra). The CDRs provided herein, however, may not only be used to define the antigen binding domain of a traditional antibody structure, but may be embedded in a variety of other polypeptide structures, as described herein.

[0346] In one embodiment the antibody or fragment thereof comprises a CDRL1, a CDRL2, a CDRL3, a CDRH1, a CDRH2, and a CDRH3, wherein the antibody or functional fragment thereof comprises a cysteine or non-canonical amino acid amino acid substitution at one or more conjugation site(s) selected from the group consisting of D70 of the antibody light chain relative to reference sequence SEQ ID NO: 455, E276 of the antibody heavy chain relative to reference sequence SEQ ID NO: 612, and T363 of the antibody heavy chain relative to reference sequence SEQ ID NO: 612. In one embodiment the antibody or fragment thereof comprises a CDRL1, a CDRL2, a CDRL3, a CDRH1, a CDRH2, and a CDRH3, wherein each CDRL1, CDRL2, CDRL3, CDRH1, CDRH2, and CDRH3, respectively, comprises a sequence selected from the group consisting of SEQ ID NO: 629, SEQ ID NO: 786, SEQ ID NO: 943, SEQ ID NO: 1100, SEQ ID NO: 1257, and SEQ ID NO: 1414; SEQ ID NO: 630, SEQ ID NO: 787, SEQ ID NO: 944, SEQ ID NO: 1101, SEQ ID NO: 1258, and SEQ ID NO: 1415; SEQ ID NO: 631, SEQ ID NO: 788, SEQ ID NO: 945, SEQ ID NO: 1102, SEQ ID NO: 1259, and SEQ ID NO: 1416; SEQ ID NO: 632, SEQ ID NO: 789, SEQ ID NO: 946, SEQ ID NO: 1103, SEQ ID NO: 1260, and SEQ ID NO: 1417; SEQ ID NO: 633, SEQ ID NO: 790, SEQ ID NO: 947, SEQ ID NO: 1104, SEQ ID NO: 1261, and SEQ ID NO: 1418; SEQ ID NO: 634, SEQ ID NO: 791, SEQ ID NO: 948, SEQ ID NO: 1105, SEQ ID NO: 1262, and SEQ ID NO: 1419; SEQ ID NO: 635, SEQ ID NO: 792, SEQ ID NO: 949, SEQ ID NO: 1106, SEQ ID NO: 1263, and SEQ ID NO: 1420; SEQ ID NO: 636, SEQ ID NO: 793, SEQ ID NO: 950, SEQ ID NO: 1107, SEQ ID NO: 1264, and SEQ ID NO: 1421; SEQ ID NO: 637, SEQ ID NO: 794, SEQ ID NO: 951, SEQ ID NO: 1108, SEQ ID NO: 1265, and SEQ ID NO: 1422; SEQ ID NO: 638, SEQ ID NO: 795, SEQ ID NO: 952, SEQ ID NO: 1109, SEQ ID NO: 1266, and SEQ ID NO: 1423; SEQ ID NO: 639, SEQ ID NO: 796, SEQ ID NO: 953, SEQ ID NO: 1110, SEQ ID NO: 1267, and SEQ ID NO: 1424; SEQ ID NO: 640, SEQ ID NO: 797, SEQ ID NO: 954, SEQ ID NO: 1111, SEQ ID NO: 1268, and SEQ ID NO: 1425; SEQ ID NO: 641, SEQ ID NO: 798, SEQ ID NO: 955, SEQ ID NO: 1112, SEQ ID NO: 1269, and SEQ ID NO: 1426; SEQ ID NO: 642, SEQ ID NO: 799, SEQ ID NO: 956, SEQ ID NO: 1113, SEQ ID NO: 1270, and SEQ ID NO: 1427; SEQ ID NO: 643, SEQ ID NO: 800, SEQ ID NO: 957, SEQ ID NO: 1114, SEQ ID NO: 1271, and SEQ ID NO: 1428; SEQ ID NO: 644, SEQ ID NO: 801, SEQ ID NO: 958, SEQ ID NO: 1115, SEQ ID NO: 1272, and SEQ ID NO: 1429; SEQ ID NO: 645, SEQ ID NO: 802, SEQ ID NO: 959, SEQ ID NO: 1116, SEQ ID NO: 1273, and SEQ ID NO: 1430; SEQ ID NO: 646, SEQ ID NO: 803, SEQ ID NO: 960, SEQ ID NO: 1117, SEQ ID NO: 1274, and SEQ ID NO: 1431; SEQ ID NO: 647, SEQ ID NO: 804, SEQ ID NO: 961, SEQ ID NO: 1118, SEQ ID NO: 1275, and SEQ ID NO: 1432; SEQ ID NO: 648, SEQ ID NO: 805, SEQ ID NO: 962, SEQ ID NO: 1119, SEQ ID NO: 1276, and SEQ ID NO: 1433; SEQ ID NO: 649, SEQ ID NO: 806, SEQ ID NO: 963, SEQ ID NO: 1120, SEQ ID NO: 1277, and SEQ ID NO: 1434; SEQ ID NO: 650, SEQ ID NO: 807, SEQ ID NO: 964, SEQ ID NO: 1121, SEQ ID NO: 1278, and SEQ ID NO: 1435; SEQ ID NO: 651, SEQ ID NO: 808, SEQ ID NO: 965, SEQ ID NO: 1122, SEQ ID NO: 1279, and SEQ ID NO: 1436; SEQ ID NO: 652, SEQ ID NO: 809, SEQ ID NO: 966, SEQ ID NO: 1123, SEQ ID NO: 1280, and SEQ ID NO: 1437; SEQ ID NO: 653, SEQ ID NO: 810, SEQ ID NO: 967, SEQ ID NO: 1124, SEQ ID NO: 1281, and SEQ ID NO: 1438; SEQ ID NO: 654, SEQ ID NO: 811, SEQ ID NO: 968, SEQ ID NO: 1125, SEQ ID NO: 1282, and SEQ ID NO: 1439; SEQ ID NO: 655, SEQ ID NO: 812, SEQ ID NO: 969, SEQ ID NO: 1126, SEQ ID NO: 1283, and SEQ ID NO: 1440; SEQ ID NO: 656, SEQ ID NO: 813, SEQ ID NO: 970, SEQ ID NO: 1127, SEQ ID NO: 1284, and SEQ ID NO: 1441; SEQ ID NO: 657, SEQ ID NO: 814, SEQ ID NO: 971, SEQ ID NO: 1128, SEQ ID NO: 1285, and SEQ ID NO: 1442; SEQ ID NO: 658, SEQ ID NO: 815, SEQ ID NO: 972, SEQ ID NO: 1129, SEQ ID NO: 1286, and SEQ ID NO: 1443; SEQ ID NO: 659, SEQ ID NO: 816, SEQ ID NO: 973, SEQ ID NO: 1130, SEQ ID NO: 1287, and SEQ ID NO: 1444; SEQ ID NO: 660, SEQ ID NO: 817, SEQ ID NO: 974, SEQ ID NO: 1131, SEQ ID NO: 1288, and SEQ ID NO: 1445; SEQ ID NO: 661, SEQ ID NO: 818, SEQ ID NO: 975, SEQ ID NO: 1132, SEQ ID NO: 1289, and SEQ ID NO: 1446; SEQ ID NO: 662, SEQ ID NO: 819, SEQ ID NO: 976, SEQ ID NO: 1133, SEQ ID NO: 1290, and SEQ ID NO: 1447; SEQ ID NO: 663, SEQ ID NO: 820, SEQ ID NO: 977, SEQ ID NO: 1134, SEQ ID NO: 1291, and SEQ ID NO: 1448; SEQ ID NO: 664, SEQ ID NO: 821, SEQ ID NO: 978, SEQ ID NO: 1135, SEQ ID NO: 1292, and SEQ ID NO: 1449; SEQ ID NO: 665, SEQ ID NO: 822, SEQ ID NO: 979, SEQ ID NO: 1136, SEQ ID NO: 1293, and SEQ ID NO: 1450; SEQ ID NO: 666, SEQ ID NO: 823, SEQ ID NO: 980, SEQ ID NO: 1137, SEQ ID NO: 1294, and SEQ ID NO: 1451; SEQ ID NO: 667, SEQ ID NO: 824, SEQ ID NO: 981, SEQ ID NO: 1138, SEQ ID NO: 1295, and SEQ ID NO: 1452; SEQ ID NO: 668, SEQ ID NO: 825, SEQ ID NO: 982, SEQ ID NO: 1139, SEQ ID NO: 1296, and SEQ ID NO: 1453; SEQ ID NO: 669, SEQ ID NO: 826, SEQ ID NO: 983, SEQ ID NO: 1140, SEQ ID NO: 1297, and SEQ ID NO: 1454; SEQ ID NO: 670, SEQ ID NO: 827, SEQ ID NO: 984, SEQ ID NO: 1141, SEQ ID NO: 1298, and SEQ ID NO: 1455; SEQ ID NO: 671, SEQ ID NO: 828, SEQ ID NO: 985, SEQ ID NO: 1142, SEQ ID NO: 1299, and SEQ ID NO: 1456; SEQ ID NO: 672, SEQ ID NO: 829, SEQ ID NO: 986, SEQ ID NO: 1143, SEQ ID NO: 1300, and SEQ ID NO: 1457; SEQ ID NO: 673, SEQ ID NO: 830, SEQ ID NO: 987, SEQ ID NO: 1144, SEQ ID NO: 1301, and SEQ ID NO: 1458; SEQ ID NO: 674, SEQ ID NO: 831, SEQ ID NO: 988, SEQ ID NO: 1145, SEQ ID NO: 1302, and SEQ ID NO: 1459; SEQ ID NO: 675, SEQ ID NO: 832, SEQ ID NO: 989, SEQ ID NO: 1146, SEQ ID NO: 1303, and SEQ ID NO: 1460; SEQ ID NO: 676, SEQ ID NO: 833, SEQ ID NO: 990, SEQ ID NO: 1147, SEQ ID NO: 1304, and SEQ ID NO: 1461; SEQ ID NO: 677, SEQ ID NO: 834, SEQ ID NO: 991, SEQ ID NO: 1148, SEQ ID NO: 1305, and SEQ ID NO: 1462; SEQ ID NO: 678, SEQ ID NO: 835, SEQ ID NO: 992, SEQ ID NO: 1149, SEQ ID NO: 1306, and SEQ ID NO: 1463; SEQ ID NO: 679, SEQ ID NO: 836, SEQ ID NO: 993, SEQ ID NO: 1150, SEQ ID NO: 1307, and SEQ ID NO: 1464; SEQ ID NO: 680, SEQ ID NO: 837, SEQ ID NO: 994, SEQ ID NO: 1151, SEQ ID NO: 1308, and SEQ ID NO: 1465; SEQ ID NO: 681, SEQ ID NO: 838, SEQ ID NO: 995, SEQ ID NO: 1152, SEQ ID NO: 1309, and SEQ ID NO: 1466; SEQ ID NO: 682, SEQ ID NO: 839, SEQ ID NO: 996, SEQ ID NO: 1153, SEQ ID NO: 1310, and SEQ ID NO: 1467; SEQ ID NO: 683, SEQ ID NO: 840, SEQ ID NO: 997, SEQ ID NO: 1154, SEQ ID NO: 1311, and SEQ ID NO: 1468; SEQ ID NO: 684, SEQ ID NO: 841, SEQ ID NO: 998, SEQ ID NO: 1155, SEQ ID NO: 1312, and SEQ ID NO: 1469; SEQ ID NO: 685, SEQ ID NO: 842, SEQ ID NO: 999, SEQ ID NO: 1156, SEQ ID NO: 1313, and SEQ ID NO: 1470; SEQ ID NO: 686, SEQ ID NO: 843, SEQ ID NO: 1000, SEQ ID NO: 1157, SEQ ID NO: 1314, and SEQ ID NO: 1471; SEQ ID NO: 687, SEQ ID NO: 844, SEQ ID NO: 1001, SEQ ID NO: 1158, SEQ ID NO: 1315, and SEQ ID NO: 1472; SEQ ID NO: 688, SEQ ID NO: 845, SEQ ID NO: 1002, SEQ ID NO: 1159, SEQ ID NO: 1316, and SEQ ID NO: 1473; SEQ ID NO: 689, SEQ ID NO: 846, SEQ ID NO: 1003, SEQ ID NO: 1160, SEQ ID NO: 1317, and SEQ ID NO: 1474; SEQ ID NO: 690, SEQ ID NO: 847, SEQ ID NO: 1004, SEQ ID NO: 1161, SEQ ID NO: 1318, and SEQ ID NO: 1475; SEQ ID NO: 691, SEQ ID NO: 848, SEQ ID NO: 1005, SEQ ID NO: 1162, SEQ ID NO: 1319, and SEQ ID NO: 1476; SEQ ID NO: 692, SEQ ID NO: 849, SEQ ID NO: 1006, SEQ ID NO: 1163, SEQ ID NO: 1320, and SEQ ID NO: 1477; SEQ ID NO: 693, SEQ ID NO: 850, SEQ ID NO: 1007, SEQ ID NO: 1164, SEQ ID NO: 1321, and SEQ ID NO: 1478; SEQ ID NO: 694, SEQ ID NO: 851, SEQ ID NO: 1008, SEQ ID NO: 1165, SEQ ID NO: 1322, and SEQ ID NO: 1479; SEQ ID NO: 695, SEQ ID NO: 852, SEQ ID NO: 1009, SEQ ID NO: 1166, SEQ ID NO: 1323, and SEQ ID NO: 1480; SEQ ID NO: 6%, SEQ ID NO: 853, SEQ ID NO: 1010, SEQ ID NO: 1167, SEQ ID NO: 1324, and SEQ ID NO: 1481; SEQ ID NO: 697, SEQ ID NO: 854, SEQ ID NO: 1011, SEQ ID NO: 1168, SEQ ID NO: 1325, and SEQ ID NO: 1482; SEQ ID NO: 698, SEQ ID NO: 855, SEQ ID NO: 1012, SEQ ID NO: 1169, SEQ ID NO: 1326, and SEQ ID NO: 1483; SEQ ID NO: 699, SEQ ID NO: 856, SEQ ID NO: 1013, SEQ ID NO: 1170, SEQ ID NO: 1327, and SEQ ID NO: 1484; SEQ ID NO: 700, SEQ ID NO: 857, SEQ ID NO: 1014, SEQ ID NO: 1171, SEQ ID NO: 1328, and SEQ ID NO: 1485; SEQ ID NO: 701, SEQ ID NO: 858, SEQ ID NO: 1015, SEQ ID NO: 1172, SEQ ID NO: 1329, and SEQ ID NO: 1486; SEQ ID NO: 702, SEQ ID NO: 859, SEQ ID NO: 1016, SEQ ID NO: 1173, SEQ ID NO: 1330, and SEQ ID NO: 1487; SEQ ID NO: 703, SEQ ID NO: 860, SEQ ID NO: 1017, SEQ ID NO: 1174, SEQ ID NO: 1331, and SEQ ID NO: 1488; SEQ ID NO: 704, SEQ ID NO: 861, SEQ ID NO: 1018, SEQ ID NO: 1175, SEQ ID NO: 1332, and SEQ ID NO: 1489; SEQ ID NO: 705, SEQ ID NO: 862, SEQ ID NO: 1019, SEQ ID NO: 1176, SEQ ID NO: 1333, and SEQ ID NO: 1490; SEQ ID NO: 706, SEQ ID NO: 863, SEQ ID NO: 1020, SEQ ID NO: 1177, SEQ ID NO: 1334, and SEQ ID NO: 1491; SEQ ID NO: 707, SEQ ID NO: 864, SEQ ID NO: 1021, SEQ ID NO: 1178, SEQ ID NO: 1335, and SEQ ID NO: 1492; SEQ ID NO: 708, SEQ ID NO: 865, SEQ ID NO: 1022, SEQ ID NO: 1179, SEQ ID NO: 1336, and SEQ ID NO: 1493; SEQ ID NO: 709, SEQ ID NO: 866, SEQ ID NO: 1023, SEQ ID NO: 1180, SEQ ID NO: 1337, and SEQ ID NO: 1494; SEQ ID NO: 710, SEQ ID NO: 867, SEQ ID NO: 1024, SEQ ID NO: 1181, SEQ ID NO: 1338, and SEQ ID NO: 1495; SEQ ID NO: 711, SEQ ID NO: 868, SEQ ID NO: 1025, SEQ ID NO: 1182, SEQ ID NO: 1339, and SEQ ID NO: 1496; SEQ ID NO: 712, SEQ ID NO: 869, SEQ ID NO: 1026, SEQ ID NO: 1183, SEQ ID NO: 1340, and SEQ ID NO: 1497; SEQ ID NO: 713, SEQ ID NO: 870, SEQ ID NO: 1027, SEQ ID NO: 1184, SEQ ID NO: 1341, and SEQ ID NO: 1498; SEQ ID NO: 714, SEQ ID NO: 871, SEQ ID NO: 1028, SEQ ID NO: 1185, SEQ ID NO: 1342, and SEQ ID NO: 1499; SEQ ID NO: 715, SEQ ID NO: 872, SEQ ID NO: 1029, SEQ ID NO: 1186, SEQ ID NO: 1343, and SEQ ID NO: 1500; SEQ ID NO: 716, SEQ ID NO: 873, SEQ ID NO: 1030, SEQ ID NO: 1187, SEQ ID NO: 1344, and SEQ ID NO: 1501; SEQ ID NO: 717, SEQ ID NO: 874, SEQ ID NO: 1031, SEQ ID NO: 1188, SEQ ID NO: 1345, and SEQ ID NO: 1502; SEQ ID NO: 718, SEQ ID NO: 875, SEQ ID NO: 1032, SEQ ID NO: 1189, SEQ ID NO: 1346, and SEQ ID NO: 1503; SEQ ID NO: 719, SEQ ID NO: 876, SEQ ID NO: 1033, SEQ ID NO: 1190, SEQ ID NO: 1347, and SEQ ID NO: 1504; SEQ ID NO: 720, SEQ ID NO: 877, SEQ ID NO: 1034, SEQ ID NO: 1191, SEQ ID NO: 1348, and SEQ ID NO: 1505; SEQ ID NO: 721, SEQ ID NO: 878, SEQ ID NO: 1035, SEQ ID NO: 1192, SEQ ID NO: 1349, and SEQ ID NO: 1506; SEQ ID NO: 722, SEQ ID NO: 879, SEQ ID NO: 1036, SEQ ID NO: 1193, SEQ ID NO: 1350, and SEQ ID NO: 1507; SEQ ID NO: 723, SEQ ID NO: 880, SEQ ID NO: 1037, SEQ ID NO: 1194, SEQ ID NO: 1351, and SEQ ID NO: 1508; SEQ ID NO: 724, SEQ ID NO: 881, SEQ ID NO: 1038, SEQ ID NO: 1195, SEQ ID NO: 1352, and SEQ ID NO: 1509; SEQ ID NO: 725, SEQ ID NO: 882, SEQ ID NO: 1039, SEQ ID NO: 11%, SEQ ID NO: 1353, and SEQ ID NO: 1510; SEQ ID NO: 726, SEQ ID NO: 883, SEQ ID NO: 1040, SEQ ID NO: 1197, SEQ ID NO: 1354, and SEQ ID NO: 1511; SEQ ID NO: 727, SEQ ID NO: 884, SEQ ID NO: 1041, SEQ ID NO: 1198, SEQ ID NO: 1355, and SEQ ID NO: 1512; SEQ ID NO: 728, SEQ ID NO: 885, SEQ ID NO: 1042, SEQ ID NO: 1199, SEQ ID NO: 1356, and SEQ ID NO: 1513; SEQ ID NO: 729, SEQ ID NO: 886, SEQ ID NO: 1043, SEQ ID NO: 1200, SEQ ID NO: 1357, and SEQ ID NO: 1514; SEQ ID NO: 730, SEQ ID NO: 887, SEQ ID NO: 1044, SEQ ID NO: 1201, SEQ ID NO: 1358, and SEQ ID NO: 1515; SEQ ID NO: 731, SEQ ID NO: 888, SEQ ID NO: 1045, SEQ ID NO: 1202, SEQ ID NO: 1359, and SEQ ID NO: 1516; SEQ ID NO: 732, SEQ ID NO: 889, SEQ ID NO: 1046, SEQ ID NO: 1203, SEQ ID NO: 1360, and SEQ ID NO: 1517; SEQ ID NO: 733, SEQ ID NO: 890, SEQ ID NO: 1047, SEQ ID NO: 1204, SEQ ID NO: 1361, and SEQ ID NO: 1518; SEQ ID NO: 734, SEQ ID NO: 891, SEQ ID NO: 1048, SEQ ID NO: 1205, SEQ ID NO: 1362, and SEQ ID NO: 1519; SEQ ID NO: 735, SEQ ID NO: 892, SEQ ID NO: 1049, SEQ ID NO: 1206, SEQ ID NO: 1363, and SEQ ID NO: 1520; SEQ ID NO: 736, SEQ ID NO: 893, SEQ ID NO: 1050, SEQ ID NO: 1207, SEQ ID NO: 1364, and SEQ ID NO: 1521; SEQ ID NO: 737, SEQ ID NO: 894, SEQ ID NO: 1051, SEQ ID NO: 1208, SEQ ID NO: 1365, and SEQ ID NO: 1522; SEQ ID NO: 738, SEQ ID NO: 895, SEQ ID NO: 1052, SEQ ID NO: 1209, SEQ ID NO: 1366, and SEQ ID NO: 1523; SEQ ID NO: 739, SEQ ID NO: 896, SEQ ID NO: 1053, SEQ ID NO: 1210, SEQ ID NO: 1367, and SEQ ID NO: 1524; SEQ ID NO: 740, SEQ ID NO: 897, SEQ ID NO: 1054, SEQ ID NO: 1211, SEQ ID NO: 1368, and SEQ ID NO: 1525; SEQ ID NO: 741, SEQ ID NO: 898, SEQ ID NO: 1055, SEQ ID NO: 1212, SEQ ID NO: 1369, and SEQ ID NO: 1526; SEQ ID NO: 742, SEQ ID NO: 899, SEQ ID NO: 1056, SEQ ID NO: 1213, SEQ ID NO: 1370, and SEQ ID NO: 1527; SEQ ID NO: 743, SEQ ID NO: 900, SEQ ID NO: 1057, SEQ ID NO: 1214, SEQ ID NO: 1371, and SEQ ID NO: 1528; SEQ ID NO: 744, SEQ ID NO: 901, SEQ ID NO: 1058, SEQ ID NO: 1215, SEQ ID NO: 1372, and SEQ ID NO: 1529; SEQ ID NO: 745, SEQ ID NO: 902, SEQ ID NO: 1059, SEQ ID NO: 1216, SEQ ID NO: 1373, and SEQ ID NO: 1530; SEQ ID NO: 746, SEQ ID NO: 903, SEQ ID NO: 1060, SEQ ID NO: 1217, SEQ ID NO: 1374, and SEQ ID NO: 1531; SEQ ID NO: 747, SEQ ID NO: 904, SEQ ID NO: 1061, SEQ ID NO: 1218, SEQ ID NO: 1375, and SEQ ID NO: 1532; SEQ ID NO: 748, SEQ ID NO: 905, SEQ ID NO: 1062, SEQ ID NO: 1219, SEQ ID NO: 1376, and SEQ ID NO: 1533; SEQ ID NO: 749, SEQ ID NO: 906, SEQ ID NO: 1063, SEQ ID NO: 1220, SEQ ID NO: 1377, and SEQ ID NO: 1534; SEQ ID NO: 750, SEQ ID NO: 907, SEQ ID NO: 1064, SEQ ID NO: 1221, SEQ ID NO: 1378, and SEQ ID NO: 1535; SEQ ID NO: 751, SEQ ID NO: 908, SEQ ID NO: 1065, SEQ ID NO: 1222, SEQ ID NO: 1379, and SEQ ID NO: 1536; SEQ ID NO: 752, SEQ ID NO: 909, SEQ ID NO: 1066, SEQ ID NO: 1223, SEQ ID NO: 1380, and SEQ ID NO: 1537; SEQ ID NO: 753, SEQ ID NO: 910, SEQ ID NO: 1067, SEQ ID NO: 1224, SEQ ID NO: 1381, and SEQ ID NO: 1538; SEQ ID NO: 754, SEQ ID NO: 911, SEQ ID NO: 1068, SEQ ID NO: 1225, SEQ ID NO: 1382, and SEQ ID NO: 1539; SEQ ID NO: 755, SEQ ID NO: 912, SEQ ID NO: 1069, SEQ ID NO: 1226, SEQ ID NO: 1383, and SEQ ID NO: 1540; SEQ ID NO: 756, SEQ ID NO: 913, SEQ ID NO: 1070, SEQ ID NO: 1227, SEQ ID NO: 1384, and SEQ ID NO: 1541; SEQ ID NO: 757, SEQ ID NO: 914, SEQ ID NO: 1071, SEQ ID NO: 1228, SEQ ID NO: 1385, and SEQ ID NO: 1542; SEQ ID NO: 758, SEQ ID NO: 915, SEQ ID NO: 1072, SEQ ID NO: 1229, SEQ ID NO: 1386, and SEQ ID NO: 1543; SEQ ID NO: 759, SEQ ID NO: 916, SEQ ID NO: 1073, SEQ ID NO: 1230, SEQ ID NO: 1387, and SEQ ID NO: 1544; SEQ ID NO: 760, SEQ ID NO: 917, SEQ ID NO: 1074, SEQ ID NO: 1231, SEQ ID NO: 1388, and SEQ ID NO: 1545; SEQ ID NO: 761, SEQ ID NO: 918, SEQ ID NO: 1075, SEQ ID NO: 1232, SEQ ID NO: 1389, and SEQ ID NO: 1546; SEQ ID NO: 762, SEQ ID NO: 919, SEQ ID NO: 1076, SEQ ID NO: 1233, SEQ ID NO: 1390, and SEQ ID NO: 1547; SEQ ID NO: 763, SEQ ID NO: 920, SEQ ID NO: 1077, SEQ ID NO: 1234, SEQ ID NO: 1391, and SEQ ID NO: 1548; SEQ ID NO: 764, SEQ ID NO: 921, SEQ ID NO: 1078, SEQ ID NO: 1235, SEQ ID NO: 1392, and SEQ ID NO: 1549; SEQ ID NO: 765, SEQ ID NO: 922, SEQ ID NO: 1079, SEQ ID NO: 1236, SEQ ID NO: 1393, and SEQ ID NO: 1550; SEQ ID NO: 766, SEQ ID NO: 923, SEQ ID NO: 1080, SEQ ID NO: 1237, SEQ ID NO: 1394, and SEQ ID NO: 1551; SEQ ID NO: 767, SEQ ID NO: 924, SEQ ID NO: 1081, SEQ ID NO: 1238, SEQ ID NO: 1395, and SEQ ID NO: 1552; SEQ ID NO: 768, SEQ ID NO: 925, SEQ ID NO: 1082, SEQ ID NO: 1239, SEQ ID NO: 1396, and SEQ ID NO: 1553; SEQ ID NO: 769, SEQ ID NO: 926, SEQ ID NO: 1083, SEQ ID NO: 1240, SEQ ID NO: 1397, and SEQ ID NO: 1554; SEQ ID NO: 770, SEQ ID NO: 927, SEQ ID NO: 1084, SEQ ID NO: 1241, SEQ ID NO: 1398, and SEQ ID NO: 1555; SEQ ID NO: 771, SEQ ID NO: 928, SEQ ID NO: 1085, SEQ ID NO: 1242, SEQ ID NO: 1399, and SEQ ID NO: 1556; SEQ ID NO: 772, SEQ ID NO: 929, SEQ ID NO: 1086, SEQ ID NO: 1243, SEQ ID NO: 1400, and SEQ ID NO: 1557; SEQ ID NO: 773, SEQ ID NO: 930, SEQ ID NO: 1087, SEQ ID NO: 1244, SEQ ID NO: 1401, and SEQ ID NO: 1558; SEQ ID NO: 774, SEQ ID NO: 931, SEQ ID NO: 1088, SEQ ID NO: 1245, SEQ ID NO: 1402, and SEQ ID NO: 1559; SEQ ID NO: 775, SEQ ID NO: 932, SEQ ID NO: 1089, SEQ ID NO: 1246, SEQ ID NO: 1403, and SEQ ID NO: 1560; SEQ ID NO: 776, SEQ ID NO: 933, SEQ ID NO: 1090, SEQ ID NO: 1247, SEQ ID NO: 1404, and SEQ ID NO: 1561; SEQ ID NO: 777, SEQ ID NO: 934, SEQ ID NO: 1091, SEQ ID NO: 1248, SEQ ID NO: 1405, and SEQ ID NO: 1562; SEQ ID NO: 778, SEQ ID NO: 935, SEQ ID NO: 1092, SEQ ID NO: 1249, SEQ ID NO: 1406, and SEQ ID NO: 1563; SEQ ID NO: 779, SEQ ID NO: 936, SEQ ID NO: 1093, SEQ ID NO: 1250, SEQ ID NO: 1407, and SEQ ID NO: 1564; SEQ ID NO: 780, SEQ ID NO: 937, SEQ ID NO: 1094, SEQ ID NO: 1251, SEQ ID NO: 1408, and SEQ ID NO: 1565; SEQ ID NO: 781, SEQ ID NO: 938, SEQ ID NO: 1095, SEQ ID NO: 1252, SEQ ID NO: 1409, and SEQ ID NO: 1566; SEQ ID NO: 782, SEQ ID NO: 939, SEQ ID NO: 1096, SEQ ID NO: 1253, SEQ ID NO: 1410, and SEQ ID NO: 1567; SEQ ID NO: 783, SEQ ID NO: 940, SEQ ID NO: 1097, SEQ ID NO: 1254, SEQ ID NO: 1411, and SEQ ID NO: 1568; SEQ ID NO: 784, SEQ ID NO: 941, SEQ ID NO: 1098, SEQ ID NO: 1255, SEQ ID NO: 1412, and SEQ ID NO: 1569; and SEQ ID NO: 785, SEQ ID NO: 942, SEQ ID NO: 1099, SEQ ID NO: 1256, SEQ ID NO: 1413, and SEQ ID NO: 1570, wherein the antibody or functional fragment thereof comprises a cysteine or non-canonical amino acid amino acid substitution at one or more conjugation site(s) selected from the group consisting of D70 of the antibody light chain relative to reference sequence SEQ ID NO: 455, E276 of the antibody heavy chain relative to reference sequence SEQ ID NO: 612, and T363 of the antibody heavy chain relative to reference sequence SEQ ID NO: 612.

[0347] In one embodiment the antibody or fragment thereof comprises a CDRL1, a CDRL2, a CDRL3, a CDRH1, a CDRH2, and a CDRH3, wherein the antibody or functional fragment thereof comprises a cysteine or non-canonical amino acid amino acid substitution at one or more conjugation site(s) selected from the group consisting of D70 of the antibody light chain relative to reference sequence SEQ ID NO: 455, E276 of the antibody heavy chain relative to reference sequence SEQ ID NO: 612, and T363 of the antibody heavy chain relative to reference sequence SEQ ID NO: 612, encoded by a polynucleotide. In one embodiment the antibody or fragment thereof comprises a CDRL1, a CDRL2, a CDRL3, a CDRH1, a CDRH2, and a CDRH3, wherein the antibody or functional fragment thereof comprises a cysteine or non-canonical amino acid amino acid substitution at one or more conjugation site(s) selected from the group consisting of D70 of the antibody light chain relative to reference sequence SEQ ID NO: 455, E276 of the antibody heavy chain relative to reference sequence SEQ ID NO: 612, and T363 of the antibody heavy chain relative to reference sequence SEQ ID NO: 612, wherein each CDRL1, CDRL2, CDRL3, CDRH1, CDRH2, and CDRH3, respectively, is encoded by a sequence selected from the group consisting of SEQ ID NO: 2199, SEQ ID NO: 2356, SEQ ID NO: 2513, SEQ ID NO: 2670, SEQ ID NO: 2827, and SEQ ID NO: 2984; SEQ ID NO: 2200, SEQ ID NO: 2357, SEQ ID NO: 2514, SEQ ID NO: 2671, SEQ ID NO: 2828, and SEQ ID NO: 2985; SEQ ID NO: 2201, SEQ ID NO: 2358, SEQ ID NO: 2515, SEQ ID NO: 2672, SEQ ID NO: 2829, and SEQ ID NO: 2986; SEQ ID NO: 2202, SEQ ID NO: 2359, SEQ ID NO: 2516, SEQ ID NO: 2673, SEQ ID NO: 2830, and SEQ ID NO: 2987; SEQ ID NO: 2203, SEQ ID NO: 2360, SEQ ID NO: 2517, SEQ ID NO: 2674, SEQ ID NO: 2831, and SEQ ID NO: 2988; SEQ ID NO: 2204, SEQ ID NO: 2361, SEQ ID NO: 2518, SEQ ID NO: 2675, SEQ ID NO: 2832, and SEQ ID NO: 2989; SEQ ID NO: 2205, SEQ ID NO: 2362, SEQ ID NO: 2519, SEQ ID NO: 2676, SEQ ID NO: 2833, and SEQ ID NO: 2990; SEQ ID NO: 2206, SEQ ID NO: 2363, SEQ ID NO: 2520, SEQ ID NO: 2677, SEQ ID NO: 2834, and SEQ ID NO: 2991; SEQ ID NO: 2207, SEQ ID NO: 2364, SEQ ID NO: 2521, SEQ ID NO: 2678, SEQ ID NO: 2835, and SEQ ID NO: 2992; SEQ ID NO: 2208, SEQ ID NO: 2365, SEQ ID NO: 2522, SEQ ID NO: 2679, SEQ ID NO: 2836, and SEQ ID NO: 2993; SEQ ID NO: 2209, SEQ ID NO: 2366, SEQ ID NO: 2523, SEQ ID NO: 2680, SEQ ID NO: 2837, and SEQ ID NO: 2994; SEQ ID NO: 2210, SEQ ID NO: 2367, SEQ ID NO: 2524, SEQ ID NO: 2681, SEQ ID NO: 2838, and SEQ ID NO: 2995; SEQ ID NO: 2211, SEQ ID NO: 2368, SEQ ID NO: 2525, SEQ ID NO: 2682, SEQ ID NO: 2839, and SEQ ID NO: 2996; SEQ ID NO: 2212, SEQ ID NO: 2369, SEQ ID NO: 2526, SEQ ID NO: 2683, SEQ ID NO: 2840, and SEQ ID NO: 2997; SEQ ID NO: 2213, SEQ ID NO: 2370, SEQ ID NO: 2527, SEQ ID NO: 2684, SEQ ID NO: 2841, and SEQ ID NO: 2998; SEQ ID NO: 2214, SEQ ID NO: 2371, SEQ ID NO: 2528, SEQ ID NO: 2685, SEQ ID NO: 2842, and SEQ ID NO: 2999; SEQ ID NO: 2215, SEQ ID NO: 2372, SEQ ID NO: 2529, SEQ ID NO: 2686, SEQ ID NO: 2843, and SEQ ID NO: 3000; SEQ ID NO: 2216, SEQ ID NO: 2373, SEQ ID NO: 2530, SEQ ID NO: 2687, SEQ ID NO: 2844, and SEQ ID NO: 3001; SEQ ID NO: 2217, SEQ ID NO: 2374, SEQ ID NO: 2531, SEQ ID NO: 2688, SEQ ID NO: 2845, and SEQ ID NO: 3002; SEQ ID NO: 2218, SEQ ID NO: 2375, SEQ ID NO: 2532, SEQ ID NO: 2689, SEQ ID NO: 2846, and SEQ ID NO: 3003; SEQ ID NO: 2219, SEQ ID NO: 2376, SEQ ID NO: 2533, SEQ ID NO: 2690, SEQ ID NO: 2847, and SEQ ID NO: 3004; SEQ ID NO: 2220, SEQ ID NO: 2377, SEQ ID NO: 2534, SEQ ID NO: 2691, SEQ ID NO: 2848, and SEQ ID NO: 3005; SEQ ID NO: 2221, SEQ ID NO: 2378, SEQ ID NO: 2535, SEQ ID NO: 2692, SEQ ID NO: 2849, and SEQ ID NO: 3006; SEQ ID NO: 2222, SEQ ID NO: 2379, SEQ ID NO: 2536, SEQ ID NO: 2693, SEQ ID NO: 2850, and SEQ ID NO: 3007; SEQ ID NO: 2223, SEQ ID NO: 2380, SEQ ID NO: 2537, SEQ ID NO: 2694, SEQ ID NO: 2851, and SEQ ID NO: 3008; SEQ ID NO: 2224, SEQ ID NO: 2381, SEQ ID NO: 2538, SEQ ID NO: 2695, SEQ ID NO: 2852, and SEQ ID NO: 3009; SEQ ID NO: 2225, SEQ ID NO: 2382, SEQ ID NO: 2539, SEQ ID NO: 26%, SEQ ID NO: 2853, and SEQ ID NO: 3010; SEQ ID NO: 2226, SEQ ID NO: 2383, SEQ ID NO: 2540, SEQ ID NO: 2697, SEQ ID NO: 2854, and SEQ ID NO: 3011; SEQ ID NO: 2227, SEQ ID NO: 2384, SEQ ID NO: 2541, SEQ ID NO: 2698, SEQ ID NO: 2855, and SEQ ID NO: 3012; SEQ ID NO: 2228, SEQ ID NO: 2385, SEQ ID NO: 2542, SEQ ID NO: 2699, SEQ ID NO: 2856, and SEQ ID NO: 3013; SEQ ID NO: 2229, SEQ ID NO: 2386, SEQ ID NO: 2543, SEQ ID NO: 2700, SEQ ID NO: 2857, and SEQ ID NO: 3014; SEQ ID NO: 2230, SEQ ID NO: 2387, SEQ ID NO: 2544, SEQ ID NO: 2701, SEQ ID NO: 2858, and SEQ ID NO: 3015; SEQ ID NO: 2231, SEQ ID NO: 2388, SEQ ID NO: 2545, SEQ ID NO: 2702, SEQ ID NO: 2859, and SEQ ID NO: 3016; SEQ ID NO: 2232, SEQ ID NO: 2389, SEQ ID NO: 2546, SEQ ID NO: 2703, SEQ ID NO: 2860, and SEQ ID NO: 3017; SEQ ID NO: 2233, SEQ ID NO: 2390, SEQ ID NO: 2547, SEQ ID NO: 2704, SEQ ID NO: 2861, and SEQ ID NO: 3018; SEQ ID NO: 2234, SEQ ID NO: 2391, SEQ ID NO: 2548, SEQ ID NO: 2705, SEQ ID NO: 2862, and SEQ ID NO: 3019; SEQ ID NO: 2235, SEQ ID NO: 2392, SEQ ID NO: 2549, SEQ ID NO: 2706, SEQ ID NO: 2863, and SEQ ID NO: 3020; SEQ ID NO: 2236, SEQ ID NO: 2393, SEQ ID NO: 2550, SEQ ID NO: 2707, SEQ ID NO: 2864, and SEQ ID NO: 3021; SEQ ID NO: 2237, SEQ ID NO: 2394, SEQ ID NO: 2551, SEQ ID NO: 2708, SEQ ID NO: 2865, and SEQ ID NO: 3022; SEQ ID NO: 2238, SEQ ID NO: 2395, SEQ ID NO: 2552, SEQ ID NO: 2709, SEQ ID NO: 2866, and SEQ ID NO: 3023; SEQ ID NO: 2239, SEQ ID NO: 23%, SEQ ID NO: 2553, SEQ ID NO: 2710, SEQ ID NO: 2867, and SEQ ID NO: 3024; SEQ ID NO: 2240, SEQ ID NO: 2397, SEQ ID NO: 2554, SEQ ID NO: 2711, SEQ ID NO: 2868, and SEQ ID NO: 3025; SEQ ID NO: 2241, SEQ ID NO: 2398, SEQ ID NO: 2555, SEQ ID NO: 2712, SEQ ID NO: 2869, and SEQ ID NO: 3026; SEQ ID NO: 2242, SEQ ID NO: 2399, SEQ ID NO: 2556, SEQ ID NO: 2713, SEQ ID NO: 2870, and SEQ ID NO: 3027; SEQ ID NO: 2243, SEQ ID NO: 2400, SEQ ID NO: 2557, SEQ ID NO: 2714, SEQ ID NO: 2871, and SEQ ID NO: 3028; SEQ ID NO: 2244, SEQ ID NO: 2401, SEQ ID NO: 2558, SEQ ID NO: 2715, SEQ ID NO: 2872, and SEQ ID NO: 3029; SEQ ID NO: 2245, SEQ ID NO: 2402, SEQ ID NO: 2559, SEQ ID NO: 2716, SEQ ID NO: 2873, and SEQ ID NO: 3030; SEQ ID NO: 2246, SEQ ID NO: 2403, SEQ ID NO: 2560, SEQ ID NO: 2717, SEQ ID NO: 2874, and SEQ ID NO: 3031; SEQ ID NO: 2247, SEQ ID NO: 2404, SEQ ID NO: 2561, SEQ ID NO: 2718, SEQ ID NO: 2875, and SEQ ID NO: 3032; SEQ ID NO: 2248, SEQ ID NO: 2405, SEQ ID NO: 2562, SEQ ID NO: 2719, SEQ ID NO: 2876, and SEQ ID NO: 3033; SEQ ID NO: 2249, SEQ ID NO: 2406, SEQ ID NO: 2563, SEQ ID NO: 2720, SEQ ID NO: 2877, and SEQ ID NO: 3034; SEQ ID NO: 2250, SEQ ID NO: 2407, SEQ ID NO: 2564, SEQ ID NO: 2721, SEQ ID NO: 2878, and SEQ ID NO: 3035; SEQ ID NO: 2251, SEQ ID NO: 2408, SEQ ID NO: 2565, SEQ ID NO: 2722, SEQ ID NO: 2879, and SEQ ID NO: 3036; SEQ ID NO: 2252, SEQ ID NO: 2409, SEQ ID NO: 2566, SEQ ID NO: 2723, SEQ ID NO: 2880, and SEQ ID NO: 3037; SEQ ID NO: 2253, SEQ ID NO: 2410, SEQ ID NO: 2567, SEQ ID NO: 2724, SEQ ID NO: 2881, and SEQ ID NO: 3038; SEQ ID NO: 2254, SEQ ID NO: 2411, SEQ ID NO: 2568, SEQ ID NO: 2725, SEQ ID NO: 2882, and SEQ ID NO: 3039; SEQ ID NO: 2255, SEQ ID NO: 2412, SEQ ID NO: 2569, SEQ ID NO: 2726, SEQ ID NO: 2883, and SEQ ID NO: 3040; SEQ ID NO: 2256, SEQ ID NO: 2413, SEQ ID NO: 2570, SEQ ID NO: 2727, SEQ ID NO: 2884, and SEQ ID NO: 3041; SEQ ID NO: 2257, SEQ ID NO: 2414, SEQ ID NO: 2571, SEQ ID NO: 2728, SEQ ID NO: 2885, and SEQ ID NO: 3042; SEQ ID NO: 2258, SEQ ID NO: 2415, SEQ ID NO: 2572, SEQ ID NO: 2729, SEQ ID NO: 2886, and SEQ ID NO: 3043; SEQ ID NO: 2259, SEQ ID NO: 2416, SEQ ID NO: 2573, SEQ ID NO: 2730, SEQ ID NO: 2887, and SEQ ID NO: 3044; SEQ ID NO: 2260, SEQ ID NO: 2417, SEQ ID NO: 2574, SEQ ID NO: 2731, SEQ ID NO: 2888, and SEQ ID NO: 3045; SEQ ID NO: 2261, SEQ ID NO: 2418, SEQ ID NO: 2575, SEQ ID NO: 2732, SEQ ID NO: 2889, and SEQ ID NO: 3046; SEQ ID NO: 2262, SEQ ID NO: 2419, SEQ ID NO: 2576, SEQ ID NO: 2733, SEQ ID NO: 2890, and SEQ ID NO: 3047; SEQ ID NO: 2263, SEQ ID NO: 2420, SEQ ID NO: 2577, SEQ ID NO: 2734, SEQ ID NO: 2891, and SEQ ID NO: 3048 SEQ ID NO: 2264, SEQ ID NO: 2421, SEQ ID NO: 2578, SEQ ID NO: 2735, SEQ ID NO: 2892, and SEQ ID NO: 3049; SEQ ID NO: 2265, SEQ ID NO: 2422, SEQ ID NO: 2579, SEQ ID NO: 2736, SEQ ID NO: 2893, and SEQ ID NO: 3050; SEQ ID NO: 2266, SEQ ID NO: 2423, SEQ ID NO: 2580, SEQ ID NO: 2737, SEQ ID NO: 2894, and SEQ ID NO: 3051; SEQ ID NO: 2267, SEQ ID NO: 2424, SEQ ID NO: 2581, SEQ ID NO: 2738, SEQ ID NO: 2895, and SEQ ID NO: 3052; SEQ ID NO: 2268, SEQ ID NO: 2425, SEQ ID NO: 2582, SEQ ID NO: 2739, SEQ ID NO: 28%, and SEQ ID NO: 3053; SEQ ID NO: 2269, SEQ ID NO: 2426, SEQ ID NO: 2583, SEQ ID NO: 2740, SEQ ID NO: 2897, and SEQ ID NO: 3054; SEQ ID NO: 2270, SEQ ID NO: 2427, SEQ ID NO: 2584, SEQ ID NO: 2741, SEQ ID NO: 2898, and SEQ ID NO: 3055; SEQ ID NO: 2271, SEQ ID NO: 2428, SEQ ID NO: 2585, SEQ ID NO: 2742, SEQ ID NO: 2899, and SEQ ID NO: 3056; SEQ ID NO: 2272, SEQ ID NO: 2429, SEQ ID NO: 2586, SEQ ID NO: 2743, SEQ ID NO: 2900, and SEQ ID NO: 3057; SEQ ID NO: 2273, SEQ ID NO: 2430, SEQ ID NO: 2587, SEQ ID NO: 2744, SEQ ID NO: 2901, and SEQ ID NO: 3058; SEQ ID NO: 2274, SEQ ID NO: 2431, SEQ ID NO: 2588, SEQ ID NO: 2745, SEQ ID NO: 2902, and SEQ ID NO: 3059; SEQ ID NO: 2275, SEQ ID NO: 2432, SEQ ID NO: 2589, SEQ ID NO: 2746, SEQ ID NO: 2903, and SEQ ID NO: 3060; SEQ ID NO: 2276, SEQ ID NO: 2433, SEQ ID NO: 2590, SEQ ID NO: 2747, SEQ ID NO: 2904, and SEQ ID NO: 3061; SEQ ID NO: 2277, SEQ ID NO: 2434, SEQ ID NO: 2591, SEQ ID NO: 2748, SEQ ID NO: 2905, and SEQ ID NO: 3062; SEQ ID NO: 2278, SEQ ID NO: 2435, SEQ ID NO: 2592, SEQ ID NO: 2749, SEQ ID NO: 2906, and SEQ ID NO: 3063; SEQ ID NO: 2279, SEQ ID NO: 2436, SEQ ID NO: 2593, SEQ ID NO: 2750, SEQ ID NO: 2907, and SEQ ID NO: 3064; SEQ ID NO: 2280, SEQ ID NO: 2437, SEQ ID NO: 2594, SEQ ID NO: 2751, SEQ ID NO: 2908, and SEQ ID NO: 3065; SEQ ID NO: 2281, SEQ ID NO: 2438, SEQ ID NO: 2595, SEQ ID NO: 2752, SEQ ID NO: 2909, and SEQ ID NO: 3066; SEQ ID NO: 2282, SEQ ID NO: 2439, SEQ ID NO: 25%, SEQ ID NO: 2753, SEQ ID NO: 2910, and SEQ ID NO: 3067; SEQ ID NO: 2283, SEQ ID NO: 2440, SEQ ID NO: 2597, SEQ ID NO: 2754, SEQ ID NO: 2911, and SEQ ID NO: 3068; SEQ ID NO: 2284, SEQ ID NO: 2441, SEQ ID NO: 2598, SEQ ID NO: 2755, SEQ ID NO: 2912, and SEQ ID NO: 3069; SEQ ID NO: 2285, SEQ ID NO: 2442, SEQ ID NO: 2599, SEQ ID NO: 2756, SEQ ID NO: 2913, and SEQ ID NO: 3070; SEQ ID NO: 2286, SEQ ID NO: 2443, SEQ ID NO: 2600, SEQ ID NO: 2757, SEQ ID NO: 2914, and SEQ ID NO: 3071; SEQ ID NO: 2287, SEQ ID NO: 2444, SEQ ID NO: 2601, SEQ ID NO: 2758, SEQ ID NO: 2915, and SEQ ID NO: 3072; SEQ ID NO: 2288, SEQ ID NO: 2445, SEQ ID NO: 2602, SEQ ID NO: 2759, SEQ ID NO: 2916, and SEQ ID NO: 3073; SEQ ID NO: 2289, SEQ ID NO: 2446, SEQ ID NO: 2603, SEQ ID NO: 2760, SEQ ID NO: 2917, and SEQ ID NO: 3074; SEQ ID NO: 2290, SEQ ID NO: 2447, SEQ ID NO: 2604, SEQ ID NO: 2761, SEQ ID NO: 2918, and SEQ ID NO: 3075; SEQ ID NO: 2291, SEQ ID NO: 2448, SEQ ID NO: 2605, SEQ ID NO: 2762, SEQ ID NO: 2919, and SEQ ID NO: 3076; SEQ ID NO: 2292, SEQ ID NO: 2449, SEQ ID NO: 2606, SEQ ID NO: 2763, SEQ ID NO: 2920, and SEQ ID NO: 3077; SEQ ID NO: 2293, SEQ ID NO: 2450, SEQ ID NO: 2607, SEQ ID NO: 2764, SEQ ID NO: 2921, and SEQ ID NO: 3078; SEQ ID NO: 2294, SEQ ID NO: 2451, SEQ ID NO: 2608, SEQ ID NO: 2765, SEQ ID NO: 2922, and SEQ ID NO: 3079; SEQ ID NO: 2295, SEQ ID NO: 2452, SEQ ID NO: 2609, SEQ ID NO: 2766, SEQ ID NO: 2923, and SEQ ID NO: 3080; SEQ ID NO: 22%, SEQ ID NO: 2453, SEQ ID NO: 2610, SEQ ID NO: 2767, SEQ ID NO: 2924, and SEQ ID NO: 3081; SEQ ID NO: 2297, SEQ ID NO: 2454, SEQ ID NO: 2611, SEQ ID NO: 2768, SEQ ID NO: 2925, and SEQ ID NO: 3082; SEQ ID NO: 2298, SEQ ID NO: 2455, SEQ ID NO: 2612, SEQ ID NO: 2769, SEQ ID NO: 2926, and SEQ ID NO: 3083; SEQ ID NO: 2299, SEQ ID NO: 2456, SEQ ID NO: 2613, SEQ ID NO: 2770, SEQ ID NO: 2927, and SEQ ID NO: 3084; SEQ ID NO: 2300, SEQ ID NO: 2457, SEQ ID NO: 2614, SEQ ID NO: 2771, SEQ ID NO: 2928, and SEQ ID NO: 3085; SEQ ID NO: 2301, SEQ ID NO: 2458, SEQ ID NO: 2615, SEQ ID NO: 2772, SEQ ID NO: 2929, and SEQ ID NO: 3086; SEQ ID NO: 2302, SEQ ID NO: 2459, SEQ ID NO: 2616, SEQ ID NO: 2773, SEQ ID NO: 2930, and SEQ ID NO: 3087; SEQ ID NO: 2303, SEQ ID NO: 2460, SEQ ID NO: 2617, SEQ ID NO: 2774, SEQ ID NO: 2931, and SEQ ID NO: 3088; SEQ ID NO: 2304, SEQ ID NO: 2461, SEQ ID NO: 2618, SEQ ID NO: 2775, SEQ ID NO: 2932, and SEQ ID NO: 3089; SEQ ID NO: 2305, SEQ ID NO: 2462, SEQ ID NO: 2619, SEQ ID NO: 2776, SEQ ID NO: 2933, and SEQ ID NO: 3090; SEQ ID NO: 2306, SEQ ID NO: 2463, SEQ ID NO: 2620, SEQ ID NO: 2777, SEQ ID NO: 2934, and SEQ ID NO: 3091; SEQ ID NO: 2307, SEQ ID NO: 2464, SEQ ID NO: 2621, SEQ ID NO: 2778, SEQ ID NO: 2935, and SEQ ID NO: 3092; SEQ ID NO: 2308, SEQ ID NO: 2465, SEQ ID NO: 2622, SEQ ID NO: 2779, SEQ ID NO: 2936, and SEQ ID NO: 3093; SEQ ID NO: 2309, SEQ ID NO: 2466, SEQ ID NO: 2623, SEQ ID NO: 2780, SEQ ID NO: 2937, and SEQ ID NO: 3094; SEQ ID NO: 2310, SEQ ID NO: 2467, SEQ ID NO: 2624, SEQ ID NO: 2781, SEQ ID NO: 2938, and SEQ ID NO: 3095; SEQ ID NO: 2311, SEQ ID NO: 2468, SEQ ID NO: 2625, SEQ ID NO: 2782, SEQ ID NO: 2939, and SEQ ID NO: 3096; SEQ ID NO: 2312, SEQ ID NO: 2469, SEQ ID NO: 2626, SEQ ID NO: 2783, SEQ ID NO: 2940, and SEQ ID NO: 3097; SEQ ID NO: 2313, SEQ ID NO: 2470, SEQ ID NO: 2627, SEQ ID NO: 2784, SEQ ID NO: 2941, and SEQ ID NO: 3098; SEQ ID NO: 2314, SEQ ID NO: 2471, SEQ ID NO: 2628, SEQ ID NO: 2785, SEQ ID NO: 2942, and SEQ ID NO: 3099; SEQ ID NO: 2315, SEQ ID NO: 2472, SEQ ID NO: 2629, SEQ ID NO: 2786, SEQ ID NO: 2943, and SEQ ID NO: 3100; SEQ ID NO: 2316, SEQ ID NO: 2473, SEQ ID NO: 2630, SEQ ID NO: 2787, SEQ ID NO: 2944, and SEQ ID NO: 3101; SEQ ID NO: 2317, SEQ ID NO: 2474, SEQ ID NO: 2631, SEQ ID NO: 2788, SEQ ID NO: 2945, and SEQ ID NO: 3102; SEQ ID NO: 2318, SEQ ID NO: 2475, SEQ ID NO: 2632, SEQ ID NO: 2789, SEQ ID NO: 2946, and SEQ ID NO: 3103; SEQ ID NO: 2319, SEQ ID NO: 2476, SEQ ID NO: 2633, SEQ ID NO: 2790, SEQ ID NO: 2947, and SEQ ID NO: 3104; SEQ ID NO: 2320, SEQ ID NO: 2477, SEQ ID NO: 2634, SEQ ID NO: 2791, SEQ ID NO: 2948, and SEQ ID NO: 3105; SEQ ID NO: 2321, SEQ ID NO: 2478, SEQ ID NO: 2635, SEQ ID NO: 2792, SEQ ID NO: 2949, and SEQ ID NO: 3106; SEQ ID NO: 2322, SEQ ID NO: 2479, SEQ ID NO: 2636, SEQ ID NO: 2793, SEQ ID NO: 2950, and SEQ ID NO: 3107; SEQ ID NO: 2323, SEQ ID NO: 2480, SEQ ID NO: 2637, SEQ ID NO: 2794, SEQ ID NO: 2951, and SEQ ID NO: 3108; SEQ ID NO: 2324, SEQ ID NO: 2481, SEQ ID NO: 2638, SEQ ID NO: 2795, SEQ ID NO: 2952, and SEQ ID NO: 3109; SEQ ID NO: 2325, SEQ ID NO: 2482, SEQ ID NO: 2639, SEQ ID NO: 2796, SEQ ID NO: 2953, and SEQ ID NO: 3110; SEQ ID NO: 2326, SEQ ID NO: 2483, SEQ ID NO: 2640, SEQ ID NO: 2797, SEQ ID NO: 2954, and SEQ ID NO: 3111; SEQ ID NO: 2327, SEQ ID NO: 2484, SEQ ID NO: 2641, SEQ ID NO: 2798, SEQ ID NO: 2955, and SEQ ID NO: 3112; SEQ ID NO: 2328, SEQ ID NO: 2485, SEQ ID NO: 2642, SEQ ID NO: 2799, SEQ ID NO: 2956, and SEQ ID NO: 3113; SEQ ID NO: 2329, SEQ ID NO: 2486, SEQ ID NO: 2643, SEQ ID NO: 2800, SEQ ID NO: 2957, and SEQ ID NO: 3114; SEQ ID NO: 2330, SEQ ID NO: 2487, SEQ ID NO: 2644, SEQ ID NO: 2801, SEQ ID NO: 2958, and SEQ ID NO: 3115; SEQ ID NO: 2331, SEQ ID NO: 2488, SEQ ID NO: 2645, SEQ ID NO: 2802, SEQ ID NO: 2959, and SEQ ID NO: 3116; SEQ ID NO: 2332, SEQ ID NO: 2489, SEQ ID NO: 2646, SEQ ID NO: 2803, SEQ ID NO: 2960, and SEQ ID NO: 3117; SEQ ID NO: 2333, SEQ ID NO: 2490, SEQ ID NO: 2647, SEQ ID NO: 2804, SEQ ID NO: 2961, and SEQ ID NO: 3118; SEQ ID NO: 2334, SEQ ID NO: 2491, SEQ ID NO: 2648, SEQ ID NO: 2805, SEQ ID NO: 2962, and SEQ ID NO: 3119; SEQ ID NO: 2335, SEQ ID NO: 2492, SEQ ID NO: 2649, SEQ ID NO: 2806, SEQ ID NO: 2963, and SEQ ID NO: 3120; SEQ ID NO: 2336, SEQ ID NO: 2493, SEQ ID NO: 2650, SEQ ID NO: 2807, SEQ ID NO: 2964, and SEQ ID NO: 3121; SEQ ID NO: 2337, SEQ ID NO: 2494, SEQ ID NO: 2651, SEQ ID NO: 2808, SEQ ID NO: 2965, and SEQ ID NO: 3122; SEQ ID NO: 2338, SEQ ID NO: 2495, SEQ ID NO: 2652, SEQ ID NO: 2809, SEQ ID NO: 2966, and SEQ ID NO: 3123; SEQ ID NO: 2339, SEQ ID NO: 24%, SEQ ID NO: 2653, SEQ ID NO: 2810, SEQ ID NO: 2967, and SEQ ID NO: 3124; SEQ ID NO: 2340, SEQ ID NO: 2497, SEQ ID NO: 2654, SEQ ID NO: 2811, SEQ ID NO: 2968, and SEQ ID NO: 3125; SEQ ID NO: 2341, SEQ ID NO: 2498, SEQ ID NO: 2655, SEQ ID NO: 2812, SEQ ID NO: 2969, and SEQ ID NO: 3126; SEQ ID NO: 2342, SEQ ID NO: 2499, SEQ ID NO: 2656, SEQ ID NO: 2813, SEQ ID NO: 2970, and SEQ ID NO: 3127; SEQ ID NO: 2343, SEQ ID NO: 2500, SEQ ID NO: 2657, SEQ ID NO: 2814, SEQ ID NO: 2971, and SEQ ID NO: 3128; SEQ ID NO: 2344, SEQ ID NO: 2501, SEQ ID NO: 2658, SEQ ID NO: 2815, SEQ ID NO: 2972, and SEQ ID NO: 3129; SEQ ID NO: 2345, SEQ ID NO: 2502, SEQ ID NO: 2659, SEQ ID NO: 2816, SEQ ID NO: 2973, and SEQ ID NO: 3130; SEQ ID NO: 2346, SEQ ID NO: 2503, SEQ ID NO: 2660, SEQ ID NO: 2817, SEQ ID NO: 2974, and SEQ ID NO: 3131; SEQ ID NO: 2347, SEQ ID NO: 2504, SEQ ID NO: 2661, SEQ ID NO: 2818, SEQ ID NO: 2975, and SEQ ID NO: 3132; SEQ ID NO: 2348, SEQ ID NO: 2505, SEQ ID NO: 2662, SEQ ID NO: 2819, SEQ ID NO: 2976, and SEQ ID NO: 3133; SEQ ID NO: 2349, SEQ ID NO: 2506, SEQ ID NO: 2663, SEQ ID NO: 2820, SEQ ID NO: 2977, and SEQ ID NO: 3134; SEQ ID NO: 2350, SEQ ID NO: 2507, SEQ ID NO: 2664, SEQ ID NO: 2821, SEQ ID NO: 2978, and SEQ ID NO: 3135; SEQ ID NO: 2351, SEQ ID NO: 2508, SEQ ID NO: 2665, SEQ ID NO: 2822, SEQ ID NO: 2979, and SEQ ID NO: 3136; SEQ ID NO: 2352, SEQ ID NO: 2509, SEQ ID NO: 2666, SEQ ID NO: 2823, SEQ ID NO: 2980, and SEQ ID NO: 3137; SEQ ID NO: 2353, SEQ ID NO: 2510, SEQ ID NO: 2667, SEQ ID NO: 2824, SEQ ID NO: 2981, and SEQ ID NO: 3138; SEQ ID NO: 2354, SEQ ID NO: 2511, SEQ ID NO: 2668, SEQ ID NO: 2825, SEQ ID NO: 2982, and SEQ ID NO: 3139; and SEQ ID NO: 2355, SEQ ID NO: 2512, SEQ ID NO: 2669, SEQ ID NO: 2826, SEQ ID NO: 2983, and SEQ ID NO: 3140.

[0348] In another aspect, an antigen binding protein includes 1, 2, 3, 4, 5, or 6 variant forms of the CDRs listed in TABLES 4A and 4B, each having at least 80%, 85% b, 90%, 95%, 96%, 97%, 98%, or 99% sequence identity to a CDR sequence listed in TABLES 4A and 4B. Some antigen binding proteins include 1, 2, 3, 4, 5, or 6 of the CDRs listed in TABLES 4A and 4B, each or collectively differing by no more than 1, 2, 3, 4 or 5 amino acids from the CDRs listed in this table.

[0349] In various other embodiments, the antigen binding protein is derived from such antibodies. For instance, in one aspect, the antigen binding protein comprises 1, 2, 3, 4, 5 or all 6 of the CDRs listed in one of the rows for any particular antibody listed in TABLES 4A and 4B. In another aspect, an antigen binding protein includes 1, 2, 3, 4, 5, or 6 variant forms of the CDRs listed in one of the rows for an antibody in TABLES 4A and 4B, each CDR having at least 80%, 85%, 90%, 95%, 96%, 97%, 98%, or 99% sequence identity to a CDR sequence listed in TABLES 4A and 4B. Some antigen binding proteins include 1, 2, 3, 4, 5, or 6 of the CDRs listed in one of the rows of TABLES 4A and 4B, each differing by no more than 1, 2, 3, 4 or 5 amino acids from the CDRs listed in these tables. In another aspect, the antigen binding protein comprises all 6 of the CDRS listed in a row of TABLES 4A and 4B and the total number of amino acid changes to the CDRs collectively is no more than 1, 2, 3, 4, or 5 amino acids.

[0350] In one embodiment the antibody or fragment thereof comprises a light chain comprising a sequence selected from the group consisting of SEQ ID NOs: 472-628 and a heavy chain comprising a sequence selected from the group consisting of SEQ ID NOs: 472-628, wherein the antibody or functional fragment thereof comprises a cysteine or non-canonical amino acid amino acid substitution at one or more conjugation site(s) selected from the group consisting of D70 of the antibody light chain relative to reference sequence SEQ ID NO: 455, E276 of the antibody heavy chain relative to reference sequence SEQ ID NO: 612, and T363 of the antibody heavy chain relative to reference sequence SEQ ID NO: 612. In one embodiment the antibody or fragment thereof comprises a combination of a light chain and a heavy chain selected from the group consisting of a light chain comprising SEQ ID NO: 315 and a heavy chain comprising SEQ ID NO: 472; a light chain comprising SEQ ID NO: 316 and a heavy chain comprising SEQ ID NO: 473; a light chain comprising SEQ ID NO: 317 and a heavy chain comprising SEQ ID NO: 474; a light chain comprising SEQ ID NO: 318 and a heavy chain comprising SEQ ID NO: 475; a light chain comprising SEQ ID NO: 319 and a heavy chain comprising SEQ ID NO: 476; a light chain comprising SEQ ID NO: 320 and a heavy chain comprising SEQ ID NO: 477; a light chain comprising SEQ ID NO: 321 and a heavy chain comprising SEQ ID NO: 478; a light chain comprising SEQ ID NO: 322 and a heavy chain comprising SEQ ID NO: 479; a light chain comprising SEQ ID NO: 323 and a heavy chain comprising SEQ ID NO: 480; a light chain comprising SEQ ID NO: 324 and a heavy chain comprising SEQ ID NO: 481; a light chain comprising SEQ ID NO: 325 and a heavy chain comprising SEQ ID NO: 482; a light chain comprising SEQ ID NO: 326 and a heavy chain comprising SEQ ID NO: 483; a light chain comprising SEQ ID NO: 327 and a heavy chain comprising SEQ ID NO: 484; a light chain comprising SEQ ID NO: 328 and a heavy chain comprising SEQ ID NO: 485; a light chain comprising SEQ ID NO: 329 and a heavy chain comprising SEQ ID NO: 486; a light chain comprising SEQ ID NO: 330 and a heavy chain comprising SEQ ID NO: 487; a light chain comprising SEQ ID NO: 331 and a heavy chain comprising SEQ ID NO: 488; a light chain comprising SEQ ID NO: 332 and a heavy chain comprising SEQ ID NO: 489; a light chain comprising SEQ ID NO: 333 and a heavy chain comprising SEQ ID NO: 490; a light chain comprising SEQ ID NO: 334 and a heavy chain comprising SEQ ID NO: 491; a light chain comprising SEQ ID NO: 335 and a heavy chain comprising SEQ ID NO: 492; a light chain comprising SEQ ID NO: 336 and a heavy chain comprising SEQ ID NO: 493; a light chain comprising SEQ ID NO: 337 and a heavy chain comprising SEQ ID NO: 494; a light chain comprising SEQ ID NO: 338 and a heavy chain comprising SEQ ID NO: 495; a light chain comprising SEQ ID NO: 339 and a heavy chain comprising SEQ ID NO: 496; a light chain comprising SEQ ID NO: 340 and a heavy chain comprising SEQ ID NO: 497; a light chain comprising SEQ ID NO: 341 and a heavy chain comprising SEQ ID NO: 498; a light chain comprising SEQ ID NO: 342 and a heavy chain comprising SEQ ID NO: 499; a light chain comprising SEQ ID NO: 343 and a heavy chain comprising SEQ ID NO: 500; a light chain comprising SEQ ID NO: 344 and a heavy chain comprising SEQ ID NO: 501; a light chain comprising SEQ ID NO: 345 and a heavy chain comprising SEQ ID NO: 502; a light chain comprising SEQ ID NO: 346 and a heavy chain comprising SEQ ID NO: 503; a light chain comprising SEQ ID NO: 347 and a heavy chain comprising SEQ ID NO: 504; a light chain comprising SEQ ID NO: 348 and a heavy chain comprising SEQ ID NO: 505; a light chain comprising SEQ ID NO: 349 and a heavy chain comprising SEQ ID NO: 506; a light chain comprising SEQ ID NO: 350 and a heavy chain comprising SEQ ID NO: 507; a light chain comprising SEQ ID NO: 351 and a heavy chain comprising SEQ ID NO: 508; a light chain comprising SEQ ID NO: 352 and a heavy chain comprising SEQ ID NO: 509; a light chain comprising SEQ ID NO: 353 and a heavy chain comprising SEQ ID NO: 510; a light chain comprising SEQ ID NO: 354 and a heavy chain comprising SEQ ID NO: 511; a light chain comprising SEQ ID NO: 355 and a heavy chain comprising SEQ ID NO: 512; a light chain comprising SEQ ID NO: 356 and a heavy chain comprising SEQ ID NO: 513; a light chain comprising SEQ ID NO: 357 and a heavy chain comprising SEQ ID NO: 514; a light chain comprising SEQ ID NO: 358 and a heavy chain comprising SEQ ID NO: 515; a light chain comprising SEQ ID NO: 359 and a heavy chain comprising SEQ ID NO: 516; a light chain comprising SEQ ID NO: 360 and a heavy chain comprising SEQ ID NO: 517; a light chain comprising SEQ ID NO: 361 and a heavy chain comprising SEQ ID NO: 518; a light chain comprising SEQ ID NO: 362 and a heavy chain comprising SEQ ID NO: 519; a light chain comprising SEQ ID NO: 363 and a heavy chain comprising SEQ ID NO: 520; a light chain comprising SEQ ID NO: 364 and a heavy chain comprising SEQ ID NO: 521; a light chain comprising SEQ ID NO: 365 and a heavy chain comprising SEQ ID NO: 522; a light chain comprising SEQ ID NO: 366 and a heavy chain comprising SEQ ID NO: 523; a light chain comprising SEQ ID NO: 367 and a heavy chain comprising SEQ ID NO: 524; a light chain comprising SEQ ID NO: 368 and a heavy chain comprising SEQ ID NO: 525; a light chain comprising SEQ ID NO: 369 and a heavy chain comprising SEQ ID NO: 526; a light chain comprising SEQ ID NO: 370 and a heavy chain comprising SEQ ID NO: 527; a light chain comprising SEQ ID NO: 371 and a heavy chain comprising SEQ ID NO: 528; a light chain comprising SEQ ID NO: 372 and a heavy chain comprising SEQ ID NO: 529; a light chain comprising SEQ ID NO: 373 and a heavy chain comprising SEQ ID NO: 530; a light chain comprising SEQ ID NO: 374 and a heavy chain comprising SEQ ID NO: 531; a light chain comprising SEQ ID NO: 375 and a heavy chain comprising SEQ ID NO: 532; a light chain comprising SEQ ID NO: 376 and a heavy chain comprising SEQ ID NO: 533; a light chain comprising SEQ ID NO: 377 and a heavy chain comprising SEQ ID NO: 534; a light chain comprising SEQ ID NO: 378 and a heavy chain comprising SEQ ID NO: 535; a light chain comprising SEQ ID NO: 379 and a heavy chain comprising SEQ ID NO: 536; a light chain comprising SEQ ID NO: 380 and a heavy chain comprising SEQ ID NO: 537; a light chain comprising SEQ ID NO: 381 and a heavy chain comprising SEQ ID NO: 538; a light chain comprising SEQ ID NO: 382 and a heavy chain comprising SEQ ID NO: 539; a light chain comprising SEQ ID NO: 383 and a heavy chain comprising SEQ ID NO: 540; a light chain comprising SEQ ID NO: 384 and a heavy chain comprising SEQ ID NO: 541; a light chain comprising SEQ ID NO: 385 and a heavy chain comprising SEQ ID NO: 542; a light chain comprising SEQ ID NO: 386 and a heavy chain comprising SEQ ID NO: 543; a light chain comprising SEQ ID NO: 387 and a heavy chain comprising SEQ ID NO: 544; a light chain comprising SEQ ID NO: 388 and a heavy chain comprising SEQ ID NO: 545; a light chain comprising SEQ ID NO: 389 and a heavy chain comprising SEQ ID NO: 546; a light chain comprising SEQ ID NO: 390 and a heavy chain comprising SEQ ID NO: 547; a light chain comprising SEQ ID NO: 391 and a heavy chain comprising SEQ ID NO: 548; a light chain comprising SEQ ID NO: 392 and a heavy chain comprising SEQ ID NO: 549; a light chain comprising SEQ ID NO: 393 and a heavy chain comprising SEQ ID NO: 550; a light chain comprising SEQ ID NO: 394 and a heavy chain comprising SEQ ID NO: 551; a light chain comprising SEQ ID NO: 395 and a heavy chain comprising SEQ ID NO: 552; a light chain comprising SEQ ID NO: 396 and a heavy chain comprising SEQ ID NO: 553; a light chain comprising SEQ ID NO: 397 and a heavy chain comprising SEQ ID NO: 554; a light chain comprising SEQ ID NO: 398 and a heavy chain comprising SEQ ID NO: 555; a light chain comprising SEQ ID NO: 399 and a heavy chain comprising SEQ ID NO: 556; a light chain comprising SEQ ID NO: 400 and a heavy chain comprising SEQ ID NO: 557; a light chain comprising SEQ ID NO: 401 and a heavy chain comprising SEQ ID NO: 558; a light chain comprising SEQ ID NO: 402 and a heavy chain comprising SEQ ID NO: 559; a light chain comprising SEQ ID NO: 403 and a heavy chain comprising SEQ ID NO: 560; a light chain comprising SEQ ID NO: 404 and a heavy chain comprising SEQ ID NO: 561; a light chain comprising SEQ ID NO: 405 and a heavy chain comprising SEQ ID NO: 562; a light chain comprising SEQ ID NO: 406 and a heavy chain comprising SEQ ID NO: 563; a light chain comprising SEQ ID NO: 407 and a heavy chain comprising SEQ ID NO: 564; a light chain comprising SEQ ID NO: 408 and a heavy chain comprising SEQ ID NO: 565; a light chain comprising SEQ ID NO: 409 and a heavy chain comprising SEQ ID NO: 566; a light chain comprising SEQ ID NO: 410 and a heavy chain comprising SEQ ID NO: 567; a light chain comprising SEQ ID NO: 411 and a heavy chain comprising SEQ ID NO: 568; a light chain comprising SEQ ID NO: 412 and a heavy chain comprising SEQ ID NO: 569; a light chain comprising SEQ ID NO: 413 and a heavy chain comprising SEQ ID NO: 570; a light chain comprising SEQ ID NO: 414 and a heavy chain comprising SEQ ID NO: 571; a light chain comprising SEQ ID NO: 415 and a heavy chain comprising SEQ ID NO: 572; a light chain comprising SEQ ID NO: 416 and a heavy chain comprising SEQ ID NO: 573; a light chain comprising SEQ ID NO: 417 and a heavy chain comprising SEQ ID NO: 574; a light chain comprising SEQ ID NO: 418 and a heavy chain comprising SEQ ID NO: 575; a light chain comprising SEQ ID NO: 419 and a heavy chain comprising SEQ ID NO: 576; a light chain comprising SEQ ID NO: 420 and a heavy chain comprising SEQ ID NO: 577; a light chain comprising SEQ ID NO: 421 and a heavy chain comprising SEQ ID NO: 578; a light chain comprising SEQ ID NO: 422 and a heavy chain comprising SEQ ID NO: 579; a light chain comprising SEQ ID NO: 423 and a heavy chain comprising SEQ ID NO: 580; a light chain comprising SEQ ID NO: 424 and a heavy chain comprising SEQ ID NO: 581; a light chain comprising SEQ ID NO: 425 and a heavy chain comprising SEQ ID NO: 582; a light chain comprising SEQ ID NO: 426 and a heavy chain comprising SEQ ID NO: 583; a light chain comprising SEQ ID NO: 427 and a heavy chain comprising SEQ ID NO: 584; a light chain comprising SEQ ID NO: 428 and a heavy chain comprising SEQ ID NO: 585; a light chain comprising SEQ ID NO: 429 and a heavy chain comprising SEQ ID NO: 586; a light chain comprising SEQ ID NO: 430 and a heavy chain comprising SEQ ID NO: 587; a light chain comprising SEQ ID NO: 431 and a heavy chain comprising SEQ ID NO: 588; a light chain comprising SEQ ID NO: 432 and a heavy chain comprising SEQ ID NO: 589; a light chain comprising SEQ ID NO: 433 and a heavy chain comprising SEQ ID NO: 590; a light chain comprising SEQ ID NO: 434 and a heavy chain comprising SEQ ID NO: 591; a light chain comprising SEQ ID NO: 435 and a heavy chain comprising SEQ ID NO: 592; a light chain comprising SEQ ID NO: 436 and a heavy chain comprising SEQ ID NO: 593; a light chain comprising SEQ ID NO: 437 and a heavy chain comprising SEQ ID NO: 594; a light chain comprising SEQ ID NO: 438 and a heavy chain comprising SEQ ID NO: 595; a light chain comprising SEQ ID NO: 439 and a heavy chain comprising SEQ ID NO: 596; a light chain comprising SEQ ID NO: 440 and a heavy chain comprising SEQ ID NO: 597; a light chain comprising SEQ ID NO: 441 and a heavy chain comprising SEQ ID NO: 598; a light chain comprising SEQ ID NO: 442 and a heavy chain comprising SEQ ID NO: 599; a light chain comprising SEQ ID NO: 443 and a heavy chain comprising SEQ ID NO: 600; a light chain comprising SEQ ID NO: 444 and a heavy chain comprising SEQ ID NO: 601; a light chain comprising SEQ ID NO: 445 and a heavy chain comprising SEQ ID NO: 602; a light chain comprising SEQ ID NO: 446 and a heavy chain comprising SEQ ID NO: 603; a light chain comprising SEQ ID NO: 447 and a heavy chain comprising SEQ ID NO: 604; a light chain comprising SEQ ID NO: 448 and a heavy chain comprising SEQ ID NO: 605; a light chain comprising SEQ ID NO: 449 and a heavy chain comprising SEQ ID NO: 606; a light chain comprising SEQ ID NO: 450 and a heavy chain comprising SEQ ID NO: 607; a light chain comprising SEQ ID NO: 451 and a heavy chain comprising SEQ ID NO: 608; a light chain comprising SEQ ID NO: 452 and a heavy chain comprising SEQ ID NO: 609; a light chain comprising SEQ ID NO: 453 and a heavy chain comprising SEQ ID NO: 610; a light chain comprising SEQ ID NO: 454 and a heavy chain comprising SEQ ID NO: 611; a light chain comprising SEQ ID NO: 455 and a heavy chain comprising SEQ ID NO: 612; a light chain comprising SEQ ID NO: 456 and a heavy chain comprising SEQ ID NO: 613; a light chain comprising SEQ ID NO: 457 and a heavy chain comprising SEQ ID NO: 614; a light chain comprising SEQ ID NO: 458 and a heavy chain comprising SEQ ID NO: 615; a light chain comprising SEQ ID NO: 459 and a heavy chain comprising SEQ ID NO: 616; a light chain comprising SEQ ID NO: 460 and a heavy chain comprising SEQ ID NO: 617; a light chain comprising SEQ ID NO: 461 and a heavy chain comprising SEQ ID NO: 618; a light chain comprising SEQ ID NO: 462 and a heavy chain comprising SEQ ID NO: 619; a light chain comprising SEQ ID NO: 463 and a heavy chain comprising SEQ ID NO: 620; a light chain comprising SEQ ID NO: 464 and a heavy chain comprising SEQ ID NO: 621; a light chain comprising SEQ ID NO: 465 and a heavy chain comprising SEQ ID NO: 622; a light chain comprising SEQ ID NO: 466 and a heavy chain comprising SEQ ID NO: 623; a light chain comprising SEQ ID NO: 467 and a heavy chain comprising SEQ ID NO: 624; a light chain comprising SEQ ID NO: 468 and a heavy chain comprising SEQ ID NO: 625; a light chain comprising SEQ ID NO: 469 and a heavy chain comprising SEQ ID NO: 626; a light chain comprising SEQ ID NO: 470 and a heavy chain comprising SEQ ID NO: 627; and a light chain comprising SEQ ID NO: 471 and a heavy chain comprising SEQ ID NO: 628, wherein the antibody or functional fragment thereof comprises a cysteine or non-canonical amino acid amino acid substitution at one or more conjugation site(s) selected from the group consisting of D70 of the antibody light chain relative to reference sequence SEQ ID NO: 455, E276 of the antibody heavy chain relative to reference sequence SEQ ID NO: 612, and T363 of the antibody heavy chain relative to reference sequence SEQ ID NO: 612.

[0351] In one embodiment the antibody or fragment thereof comprises a light chain encoded by a polynucleotide sequence selected from the group consisting of SEQ ID NOs: 1885-2014 and a heavy chain comprising a sequence selected from the group consisting of SEQ ID NOs: 2042-2198, wherein the antibody or functional fragment thereof comprises a cysteine or non-canonical amino acid amino acid substitution at one or more conjugation site(s) selected from the group consisting of D70 of the antibody light chain relative to reference sequence SEQ ID NO: 455, E276 of the antibody heavy chain relative to reference sequence SEQ ID NO: 612, and T363 of the antibody heavy chain relative to reference sequence SEQ ID NO: 612. In one embodiment the antibody or fragment thereof comprises a combination of a light chain and a heavy chain, wherein the antibody or functional fragment thereof comprises a cysteine or non-canonical amino acid amino acid substitution at one or more conjugation site(s) selected from the group consisting of D70 of the antibody light chain relative to reference sequence SEQ ID NO: 455, E276 of the antibody heavy chain relative to reference sequence SEQ ID NO: 612, and T363 of the antibody heavy chain relative to reference sequence SEQ ID NO: 612, selected from the group consisting of a light chain encoded by a polynucleotide sequence comprising SEQ ID NO: 1885 and a heavy chain encoded by a polynucleotide sequence comprising SEQ ID NO: 2042; a light chain encoded by a polynucleotide sequence comprising SEQ ID NO: 1886 and a heavy chain encoded by a polynucleotide sequence comprising SEQ ID NO: 2043; a light chain encoded by a polynucleotide sequence comprising SEQ ID NO: 1887 and a heavy chain encoded by a polynucleotide sequence comprising SEQ ID NO: 2044; a light chain encoded by a polynucleotide sequence comprising SEQ ID NO: 1888 and a heavy chain encoded by a polynucleotide sequence comprising SEQ ID NO: 2045; a light chain encoded by a polynucleotide sequence comprising SEQ ID NO: 1889 and a heavy chain encoded by a polynucleotide sequence comprising SEQ ID NO: 2046; a light chain encoded by a polynucleotide sequence comprising SEQ ID NO: 1890 and a heavy chain encoded by a polynucleotide sequence comprising SEQ ID NO: 2047; a light chain encoded by a polynucleotide sequence comprising SEQ ID NO: 1891 and a heavy chain encoded by a polynucleotide sequence comprising SEQ ID NO: 2048; a light chain encoded by a polynucleotide sequence comprising SEQ ID NO: 1892 and a heavy chain encoded by a polynucleotide sequence comprising SEQ ID NO: 2049; a light chain encoded by a polynucleotide sequence comprising SEQ ID NO: 1893 and a heavy chain encoded by a polynucleotide sequence comprising SEQ ID NO: 2050; a light chain encoded by a polynucleotide sequence comprising SEQ ID NO: 1894 and a heavy chain encoded by a polynucleotide sequence comprising SEQ ID NO: 2051; a light chain encoded by a polynucleotide sequence comprising SEQ ID NO: 1895 and a heavy chain encoded by a polynucleotide sequence comprising SEQ ID NO: 2052; a light chain encoded by a polynucleotide sequence comprising SEQ ID NO: 1896 and a heavy chain encoded by a polynucleotide sequence comprising SEQ ID NO: 2053; a light chain encoded by a polynucleotide sequence comprising SEQ ID NO: 1897 and a heavy chain encoded by a polynucleotide sequence comprising SEQ ID NO: 2054; a light chain encoded by a polynucleotide sequence comprising SEQ ID NO: 1898 and a heavy chain encoded by a polynucleotide sequence comprising SEQ ID NO: 2055; a light chain encoded by a polynucleotide sequence comprising SEQ ID NO: 1899 and a heavy chain encoded by a polynucleotide sequence comprising SEQ ID NO: 2056; a light chain encoded by a polynucleotide sequence comprising SEQ ID NO: 1900 and a heavy chain encoded by a polynucleotide sequence comprising SEQ ID NO: 2057; a light chain encoded by a polynucleotide sequence comprising SEQ ID NO: 1901 and a heavy chain encoded by a polynucleotide sequence comprising SEQ ID NO: 2058; a light chain encoded by a polynucleotide sequence comprising SEQ ID NO: 1902 and a heavy chain encoded by a polynucleotide sequence comprising SEQ ID NO: 2059; a light chain encoded by a polynucleotide sequence comprising SEQ ID NO: 1903 and a heavy chain encoded by a polynucleotide sequence comprising SEQ ID NO: 2060; a light chain encoded by a polynucleotide sequence comprising SEQ ID NO: 1904 and a heavy chain encoded by a polynucleotide sequence comprising SEQ ID NO: 2061; a light chain encoded by a polynucleotide sequence comprising SEQ ID NO: 1905 and a heavy chain encoded by a polynucleotide sequence comprising SEQ ID NO: 2062; a light chain encoded by a polynucleotide sequence comprising SEQ ID NO: 1906 and a heavy chain encoded by a polynucleotide sequence comprising SEQ ID NO: 2063; a light chain encoded by a polynucleotide sequence comprising SEQ ID NO: 1907 and a heavy chain encoded by a polynucleotide sequence comprising SEQ ID NO: 2064; a light chain encoded by a polynucleotide sequence comprising SEQ ID NO: 1908 and a heavy chain encoded by a polynucleotide sequence comprising SEQ ID NO: 2065; a light chain encoded by a polynucleotide sequence comprising SEQ ID NO: 1909 and a heavy chain encoded by a polynucleotide sequence comprising SEQ ID NO: 2066; a light chain encoded by a polynucleotide sequence comprising SEQ ID NO: 1910 and a heavy chain encoded by a polynucleotide sequence comprising SEQ ID NO: 2067; a light chain encoded by a polynucleotide sequence comprising SEQ ID NO: 1911 and a heavy chain encoded by a polynucleotide sequence comprising SEQ ID NO: 2068; a light chain encoded by a polynucleotide sequence comprising SEQ ID NO: 1912 and a heavy chain encoded by a polynucleotide sequence comprising SEQ ID NO: 2069; a light chain encoded by a polynucleotide sequence comprising SEQ ID NO: 1913 and a heavy chain encoded by a polynucleotide sequence comprising SEQ ID NO: 2070; a light chain encoded by a polynucleotide sequence comprising SEQ ID NO: 1914 and a heavy chain encoded by a polynucleotide sequence comprising SEQ ID NO: 2071; a light chain encoded by a polynucleotide sequence comprising SEQ ID NO: 1915 and a heavy chain encoded by a polynucleotide sequence comprising SEQ ID NO: 2072; a light chain encoded by a polynucleotide sequence comprising SEQ ID NO: 1916 and a heavy chain encoded by a polynucleotide sequence comprising SEQ ID NO: 2073; a light chain encoded by a polynucleotide sequence comprising SEQ ID NO: 1917 and a heavy chain encoded by a polynucleotide sequence comprising SEQ ID NO: 2074; a light chain encoded by a polynucleotide sequence comprising SEQ ID NO: 1918 and a heavy chain encoded by a polynucleotide sequence comprising SEQ ID NO: 2075; a light chain encoded by a polynucleotide sequence comprising SEQ ID NO: 1919 and a heavy chain encoded by a polynucleotide sequence comprising SEQ ID NO: 2076; a light chain encoded by a polynucleotide sequence comprising SEQ ID NO: 1920 and a heavy chain encoded by a polynucleotide sequence comprising SEQ ID NO: 2077; a light chain encoded by a polynucleotide sequence comprising SEQ ID NO: 1921 and a heavy chain encoded by a polynucleotide sequence comprising SEQ ID NO: 2078; a light chain encoded by a polynucleotide sequence comprising SEQ ID NO: 1922 and a heavy chain encoded by a polynucleotide sequence comprising SEQ ID NO: 2079; a light chain encoded by a polynucleotide sequence comprising SEQ ID NO: 1923 and a heavy chain encoded by a polynucleotide sequence comprising SEQ ID NO: 2080; a light chain encoded by a polynucleotide sequence comprising SEQ ID NO: 1924 and a heavy chain encoded by a polynucleotide sequence comprising SEQ ID NO: 2081; a light chain encoded by a polynucleotide sequence comprising SEQ ID NO: 1925 and a heavy chain encoded by a polynucleotide sequence comprising SEQ ID NO: 2082; a light chain encoded by a polynucleotide sequence comprising SEQ ID NO: 1926 and a heavy chain encoded by a polynucleotide sequence comprising SEQ ID NO: 2083; a light chain encoded by a polynucleotide sequence comprising SEQ ID NO: 1927 and a heavy chain encoded by a polynucleotide sequence comprising SEQ ID NO: 2084; a light chain encoded by a polynucleotide sequence comprising SEQ ID NO: 1928 and a heavy chain encoded by a polynucleotide sequence comprising SEQ ID NO: 2085; a light chain encoded by a polynucleotide sequence comprising SEQ ID NO: 1929 and a heavy chain encoded by a polynucleotide sequence comprising SEQ ID NO: 2086; a light chain encoded by a polynucleotide sequence comprising SEQ ID NO: 1930 and a heavy chain encoded by a polynucleotide sequence comprising SEQ ID NO: 2087; a light chain encoded by a polynucleotide sequence comprising SEQ ID NO: 1931 and a heavy chain encoded by a polynucleotide sequence comprising SEQ ID NO: 2088; a light chain encoded by a polynucleotide sequence comprising SEQ ID NO: 1932 and a heavy chain encoded by a polynucleotide sequence comprising SEQ ID NO: 2089; a light chain encoded by a polynucleotide sequence comprising SEQ ID NO: 1933 and a heavy chain encoded by a polynucleotide sequence comprising SEQ ID NO: 2090; a light chain encoded by a polynucleotide sequence comprising SEQ ID NO: 1934 and a heavy chain encoded by a polynucleotide sequence comprising SEQ ID NO: 2091; a light chain encoded by a polynucleotide sequence comprising SEQ ID NO: 1935 and a heavy chain encoded by a polynucleotide sequence comprising SEQ ID NO: 2092; a light chain encoded by a polynucleotide sequence comprising SEQ ID NO: 1936 and a heavy chain encoded by a polynucleotide sequence comprising SEQ ID NO: 2093; a light chain encoded by a polynucleotide sequence comprising SEQ ID NO: 1937 and a heavy chain encoded by a polynucleotide sequence comprising SEQ ID NO: 2094; a light chain encoded by a polynucleotide sequence comprising SEQ ID NO: 1938 and a heavy chain encoded by a polynucleotide sequence comprising SEQ ID NO: 2095; a light chain encoded by a polynucleotide sequence comprising SEQ ID NO: 1939 and a heavy chain encoded by a polynucleotide sequence comprising SEQ ID NO: 2096; a light chain encoded by a polynucleotide sequence comprising SEQ ID NO: 1940 and a heavy chain encoded by a polynucleotide sequence comprising SEQ ID NO: 2097; a light chain encoded by a polynucleotide sequence comprising SEQ ID NO: 1941 and a heavy chain encoded by a polynucleotide sequence comprising SEQ ID NO: 2098; a light chain encoded by a polynucleotide sequence comprising SEQ ID NO: 1942 and a heavy chain encoded by a polynucleotide sequence comprising SEQ ID NO: 2099; a light chain encoded by a polynucleotide sequence comprising SEQ ID NO: 1943 and a heavy chain encoded by a polynucleotide sequence comprising SEQ ID NO: 2100; a light chain encoded by a polynucleotide sequence comprising SEQ ID NO: 1944 and a heavy chain encoded by a polynucleotide sequence comprising SEQ ID NO: 2101; a light chain encoded by a polynucleotide sequence comprising SEQ ID NO: 1945 and a heavy chain encoded by a polynucleotide sequence comprising SEQ ID NO: 2102; a light chain encoded by a polynucleotide sequence comprising SEQ ID NO: 1946 and a heavy chain encoded by a polynucleotide sequence comprising SEQ ID NO: 2103; a light chain encoded by a polynucleotide sequence comprising SEQ ID NO: 1947 and a heavy chain encoded by a polynucleotide sequence comprising SEQ ID NO: 2104; a light chain encoded by a polynucleotide sequence comprising SEQ ID NO: 1948 and a heavy chain encoded by a polynucleotide sequence comprising SEQ ID NO: 2105; a light chain encoded by a polynucleotide sequence comprising SEQ ID NO: 1949 and a heavy chain encoded by a polynucleotide sequence comprising SEQ ID NO: 2106; a light chain encoded by a polynucleotide sequence comprising SEQ ID NO: 1950 and a heavy chain encoded by a polynucleotide sequence comprising SEQ ID NO: 2107; a light chain encoded by a polynucleotide sequence comprising SEQ ID NO: 1951 and a heavy chain encoded by a polynucleotide sequence comprising SEQ ID NO: 2108; a light chain encoded by a polynucleotide sequence comprising SEQ ID NO: 1952 and a heavy chain encoded by a polynucleotide sequence comprising SEQ ID NO: 2109; a light chain encoded by a polynucleotide sequence comprising SEQ ID NO: 1953 and a heavy chain encoded by a polynucleotide sequence comprising SEQ ID NO: 2110; a light chain encoded by a polynucleotide sequence comprising SEQ ID NO: 1954 and a heavy chain encoded by a polynucleotide sequence comprising SEQ ID NO: 2111; a light chain encoded by a polynucleotide sequence comprising SEQ ID NO: 1955 and a heavy chain encoded by a polynucleotide sequence comprising SEQ ID NO: 2112; a light chain encoded by a polynucleotide sequence comprising SEQ ID NO: 1956 and a heavy chain encoded by a polynucleotide sequence comprising SEQ ID NO: 2113; a light chain encoded by a polynucleotide sequence comprising SEQ ID NO: 1957 and a heavy chain encoded by a polynucleotide sequence comprising SEQ ID NO: 2114; a light chain encoded by a polynucleotide sequence comprising SEQ ID NO: 1958 and a heavy chain encoded by a polynucleotide sequence comprising SEQ ID NO: 2115; a light chain encoded by a polynucleotide sequence comprising SEQ ID NO: 1959 and a heavy chain encoded by a polynucleotide sequence comprising SEQ ID NO: 2116; a light chain encoded by a polynucleotide sequence comprising SEQ ID NO: 1960 and a heavy chain encoded by a polynucleotide sequence comprising SEQ ID NO: 2117; a light chain encoded by a polynucleotide sequence comprising SEQ ID NO: 1961 and a heavy chain encoded by a polynucleotide sequence comprising SEQ ID NO: 2118; a light chain encoded by a polynucleotide sequence comprising SEQ ID NO: 1962 and a heavy chain encoded by a polynucleotide sequence comprising SEQ ID NO: 2119; a light chain encoded by a polynucleotide sequence comprising SEQ ID NO: 1963 and a heavy chain encoded by a polynucleotide sequence comprising SEQ ID NO: 2120; a light chain encoded by a polynucleotide sequence comprising SEQ ID NO: 1964 and a heavy chain encoded by a polynucleotide sequence comprising SEQ ID NO: 2121; a light chain encoded by a polynucleotide sequence comprising SEQ ID NO: 1965 and a heavy chain encoded by a polynucleotide sequence comprising SEQ ID NO: 2122; a light chain encoded by a polynucleotide sequence comprising SEQ ID NO: 1966 and a heavy chain encoded by a polynucleotide sequence comprising SEQ ID NO: 2123; a light chain encoded by a polynucleotide sequence comprising SEQ ID NO: 1967 and a heavy chain encoded by a polynucleotide sequence comprising SEQ ID NO: 2124; a light chain encoded by a polynucleotide sequence comprising SEQ ID NO: 1968 and a heavy chain encoded by a polynucleotide sequence comprising SEQ ID NO: 2125; a light chain encoded by a polynucleotide sequence comprising SEQ ID NO: 1969 and a heavy chain encoded by a polynucleotide sequence comprising SEQ ID NO: 2126; a light chain encoded by a polynucleotide sequence comprising SEQ ID NO: 1970 and a heavy chain encoded by a polynucleotide sequence comprising SEQ ID NO: 2127; a light chain encoded by a polynucleotide sequence comprising SEQ ID NO: 1971 and a heavy chain encoded by a polynucleotide sequence comprising SEQ ID NO: 2128; a light chain encoded by a polynucleotide sequence comprising SEQ ID NO: 1972 and a heavy chain encoded by a polynucleotide sequence comprising SEQ ID NO: 2129; a light chain encoded by a polynucleotide sequence comprising SEQ ID NO: 1973 and a heavy chain encoded by a polynucleotide sequence comprising SEQ ID NO: 2130; a light chain encoded by a polynucleotide sequence comprising SEQ ID NO: 1974 and a heavy chain encoded by a polynucleotide sequence comprising SEQ ID NO: 2131; a light chain encoded by a polynucleotide sequence comprising SEQ ID NO: 1975 and a heavy chain encoded by a polynucleotide sequence comprising SEQ ID NO: 2132; a light chain encoded by a polynucleotide sequence comprising SEQ ID NO: 1976 and a heavy chain encoded by a polynucleotide sequence comprising SEQ ID NO: 2133; a light chain encoded by a polynucleotide sequence comprising SEQ ID NO: 1977 and a heavy chain encoded by a polynucleotide sequence comprising SEQ ID NO: 2134; a light chain encoded by a polynucleotide sequence comprising SEQ ID NO: 1978 and a heavy chain encoded by a polynucleotide sequence comprising SEQ ID NO: 2135; a light chain encoded by a polynucleotide sequence comprising SEQ ID NO: 1979 and a heavy chain encoded by a polynucleotide sequence comprising SEQ ID NO: 2136; a light chain encoded by a polynucleotide sequence comprising SEQ ID NO: 1980 and a heavy chain encoded by a polynucleotide sequence comprising SEQ ID NO: 2137; a light chain encoded by a polynucleotide sequence comprising SEQ ID NO: 1981 and a heavy chain encoded by a polynucleotide sequence comprising SEQ ID NO: 2138; a light chain encoded by a polynucleotide sequence comprising SEQ ID NO: 1982 and a heavy chain encoded by a polynucleotide sequence comprising SEQ ID NO: 2139; a light chain encoded by a polynucleotide sequence comprising SEQ ID NO: 1983 and a heavy chain encoded by a polynucleotide sequence comprising SEQ ID NO: 2140; a light chain encoded by a polynucleotide sequence comprising SEQ ID NO: 1984 and a heavy chain encoded by a polynucleotide sequence comprising SEQ ID NO: 2141; a light chain encoded by a polynucleotide sequence comprising SEQ ID NO: 1985 and a heavy chain encoded by a polynucleotide sequence comprising SEQ ID NO: 2142; a light chain encoded by a polynucleotide sequence comprising SEQ ID NO: 1986 and a heavy chain encoded by a polynucleotide sequence comprising SEQ ID NO: 2143; a light chain encoded by a polynucleotide sequence comprising SEQ ID NO: 1987 and a heavy chain encoded by a polynucleotide sequence comprising SEQ ID NO: 2144; a light chain encoded by a polynucleotide sequence comprising SEQ ID NO: 1988 and a heavy chain encoded by a polynucleotide sequence comprising SEQ ID NO: 2145; a light chain encoded by a polynucleotide sequence comprising SEQ ID NO: 1989 and a heavy chain encoded by a polynucleotide sequence comprising SEQ ID NO: 2146; a light chain encoded by a polynucleotide sequence comprising SEQ ID NO: 1990 and a heavy chain encoded by a polynucleotide sequence comprising SEQ ID NO: 2147; a light chain encoded by a polynucleotide sequence comprising SEQ ID NO: 1991 and a heavy chain encoded by a polynucleotide sequence comprising SEQ ID NO: 2148; a light chain encoded by a polynucleotide sequence comprising SEQ ID NO: 1992 and a heavy chain encoded by a polynucleotide sequence comprising SEQ ID NO: 2149; a light chain encoded by a polynucleotide sequence comprising SEQ ID NO: 1993 and a heavy chain encoded by a polynucleotide sequence comprising SEQ ID NO: 2150; a light chain encoded by a polynucleotide sequence comprising SEQ ID NO: 1994 and a heavy chain encoded by a polynucleotide sequence comprising SEQ ID NO: 2151; a light chain encoded by a polynucleotide sequence comprising SEQ ID NO: 1995 and a heavy chain encoded by a polynucleotide sequence comprising SEQ ID NO: 2152; a light chain encoded by a polynucleotide sequence comprising SEQ ID NO: 1996 and a heavy chain encoded by a polynucleotide sequence comprising SEQ ID NO: 2153; a light chain encoded by a polynucleotide sequence comprising SEQ ID NO: 1997 and a heavy chain encoded by a polynucleotide sequence comprising SEQ ID NO: 2154; a light chain encoded by a polynucleotide sequence comprising SEQ ID NO: 1998 and a heavy chain encoded by a polynucleotide sequence comprising SEQ ID NO: 2155; a light chain encoded by a polynucleotide sequence comprising SEQ ID NO: 1999 and a heavy chain encoded by a polynucleotide sequence comprising SEQ ID NO: 2156; a light chain encoded by a polynucleotide sequence comprising SEQ ID NO: 2000 and a heavy chain encoded by a polynucleotide sequence comprising SEQ ID NO: 2157; a light chain encoded by a polynucleotide sequence comprising SEQ ID NO: 2001 and a heavy chain encoded by a polynucleotide sequence comprising SEQ ID NO: 2158; a light chain encoded by a polynucleotide sequence comprising SEQ ID NO: 2002 and a heavy chain encoded by a polynucleotide sequence comprising SEQ ID NO: 2159; a light chain encoded by a polynucleotide sequence comprising SEQ ID NO: 2003 and a heavy chain encoded by a polynucleotide sequence comprising SEQ ID NO: 2160; a light chain encoded by a polynucleotide sequence comprising SEQ ID NO: 2004 and a heavy chain encoded by a polynucleotide sequence comprising SEQ ID NO: 2161; a light chain encoded by a polynucleotide sequence comprising SEQ ID NO: 2005 and a heavy chain encoded by a polynucleotide sequence comprising SEQ ID NO: 2162; a light chain encoded by a polynucleotide sequence comprising SEQ ID NO: 2006 and a heavy chain encoded by a polynucleotide sequence comprising SEQ ID NO: 2163; a light chain encoded by a polynucleotide sequence comprising SEQ ID NO: 2007 and a heavy chain encoded by a polynucleotide sequence comprising SEQ ID NO: 2164; a light chain encoded by a polynucleotide sequence comprising SEQ ID NO: 2008 and a heavy chain encoded by a polynucleotide sequence comprising SEQ ID NO: 2165; a light chain encoded by a polynucleotide sequence comprising SEQ ID NO: 2009 and a heavy chain encoded by a polynucleotide sequence comprising SEQ ID NO: 2166; a light chain encoded by a polynucleotide sequence comprising SEQ ID NO: 2010 and a heavy chain encoded by a polynucleotide sequence comprising SEQ ID NO: 2167; a light chain encoded by a polynucleotide sequence comprising SEQ ID NO: 2011 and a heavy chain encoded by a polynucleotide sequence comprising SEQ ID NO: 2168; a light chain encoded by a polynucleotide sequence comprising SEQ ID NO: 2012 and a heavy chain encoded by a polynucleotide sequence comprising SEQ ID NO: 2169; a light chain encoded by a polynucleotide sequence comprising SEQ ID NO: 2013 and a heavy chain encoded by a polynucleotide sequence comprising SEQ ID NO: 2170; a light chain encoded by a polynucleotide sequence comprising SEQ ID NO: 2014 and a heavy chain encoded by a polynucleotide sequence comprising SEQ ID NO: 2171; a light chain encoded by a polynucleotide sequence comprising SEQ ID NO: 2015 and a heavy chain encoded by a polynucleotide sequence comprising SEQ ID NO: 2172; a light chain encoded by a polynucleotide sequence comprising SEQ ID NO: 2016 and a heavy chain encoded by a polynucleotide sequence comprising SEQ ID NO: 2173; a light chain encoded by a polynucleotide sequence comprising SEQ ID NO: 2017 and a heavy chain encoded by a polynucleotide sequence comprising SEQ ID NO: 2174; a light chain encoded by a polynucleotide sequence comprising SEQ ID NO: 2018 and a heavy chain encoded by a polynucleotide sequence comprising SEQ ID NO: 2175; a light chain encoded by a polynucleotide sequence comprising SEQ ID NO: 2019 and a heavy chain encoded by a polynucleotide sequence comprising SEQ ID NO: 2176; a light chain encoded by a polynucleotide sequence comprising SEQ ID NO: 2020 and a heavy chain encoded by a polynucleotide sequence comprising SEQ ID NO: 2177; a light chain encoded by a polynucleotide sequence comprising SEQ ID NO: 2021 and a heavy chain encoded by a polynucleotide sequence comprising SEQ ID NO: 2178; a light chain encoded by a polynucleotide sequence comprising SEQ ID NO: 2022 and a heavy chain encoded by a polynucleotide sequence comprising SEQ ID NO: 2179; a light chain encoded by a polynucleotide sequence comprising SEQ ID NO: 2023 and a heavy chain encoded by a polynucleotide sequence comprising SEQ ID NO: 2180; a light chain encoded by a polynucleotide sequence comprising SEQ ID NO: 2024 and a heavy chain encoded by a polynucleotide sequence comprising SEQ ID NO: 2181; a light chain encoded by a polynucleotide sequence comprising SEQ ID NO: 2025 and a heavy chain encoded by a polynucleotide sequence comprising SEQ ID NO: 2182; a light chain encoded by a polynucleotide sequence comprising SEQ ID NO: 2026 and a heavy chain encoded by a polynucleotide sequence comprising SEQ ID NO: 2183; a light chain encoded by a polynucleotide sequence comprising SEQ ID NO: 2027 and a heavy chain encoded by a polynucleotide sequence comprising SEQ ID NO: 2184; a light chain encoded by a polynucleotide sequence comprising SEQ ID NO: 2028 and a heavy chain encoded by a polynucleotide sequence comprising SEQ ID NO: 2185; a light chain encoded by a polynucleotide sequence comprising SEQ ID NO: 2029 and a heavy chain encoded by a polynucleotide sequence comprising SEQ ID NO: 2186; a light chain encoded by a polynucleotide sequence comprising SEQ ID NO: 2030 and a heavy chain encoded by a polynucleotide sequence comprising SEQ ID NO: 2187; a light chain encoded by a polynucleotide sequence comprising SEQ ID NO: 2031 and a heavy chain encoded by a polynucleotide sequence comprising SEQ ID NO: 2188; a light chain encoded by a polynucleotide sequence comprising SEQ ID NO: 2032 and a heavy chain encoded by a polynucleotide sequence comprising SEQ ID NO: 2189; a light chain encoded by a polynucleotide sequence comprising SEQ ID NO: 2033 and a heavy chain encoded by a polynucleotide sequence comprising SEQ ID NO: 2190; a light chain encoded by a polynucleotide sequence comprising SEQ ID NO: 2034 and a heavy chain encoded by a polynucleotide sequence comprising SEQ ID NO: 2191; a light chain encoded by a polynucleotide sequence comprising SEQ ID NO: 2035 and a heavy chain encoded by a polynucleotide sequence comprising SEQ ID NO: 2192; a light chain encoded by a polynucleotide sequence comprising SEQ ID NO: 2036 and a heavy chain encoded by a polynucleotide sequence comprising SEQ ID NO: 2193; a light chain encoded by a polynucleotide sequence comprising SEQ ID NO: 2037 and a heavy chain encoded by a polynucleotide sequence comprising SEQ ID NO: 2194; a light chain encoded by a polynucleotide sequence comprising SEQ ID NO: 2038 and a heavy chain encoded by a polynucleotide sequence comprising SEQ ID NO: 2195; a light chain encoded by a polynucleotide sequence comprising SEQ ID NO: 2039 and a heavy chain encoded by a polynucleotide sequence comprising SEQ ID NO: 21%; a light chain encoded by a polynucleotide sequence comprising SEQ ID NO: 2040 and a heavy chain encoded by a polynucleotide sequence comprising SEQ ID NO: 2197; and a light chain encoded by a polynucleotide sequence comprising SEQ ID NO: 2041 and a heavy chain encoded by a polynucleotide sequence comprising SEQ ID NO: 2198.

[0352] In another aspect, the antigen binding protein comprises a full length light chain and a full length heavy chain as listed in one of the rows for one of the antibodies listed in TABLE 5. Some antigen binding proteins that are provided comprise a full length light chain and a full length heavy chain as listed in one of the rows for one of the antibodies listed in TABLE 5, except that one or both of the chains differs from the sequence specified in the table at only 1, 2, 3, 4, 5, 6, 7, 8, 9, 10, 11, 12, 13, 14 or 15 amino acid residues, wherein each such sequence difference is independently either a single amino acid deletion, insertion or substitution, with the deletions, insertions and/or substitutions resulting in no more than 1, 2, 3, 4, 5, 6, 7, 8, 9, 10, 11, 12, 13, 14 or 15 amino acid changes relative to the full length sequences specified in TABLE 5. In one embodiment the antigen binding protein comprises a full length light chain and/or a full length heavy chain from Table 5 with the N-terminal methionine deleted. In one embodiment the antigen binding protein comprises a full length light chain and/or a full length heavy chain from Table 5 with the C-terminal lysine deleted. Other antigen binding proteins also comprise a full length light chain and a full length heavy chain as listed in one of the rows for one of the antibodies listed in TABLE 5, except that one or both of the chains differs from the sequence specified in the table in that the light chain and/or heavy chain comprises or consists of a sequence of amino acids that has at least 70%, 75%, 80%, 85%, 90%, 95%, 96%, 97%, 98%, or 99% sequence identity to the amino acid sequences of the light chain or heavy chain sequences as specified in TABLE 5.

[0353] In another embodiment, the antigen binding protein consists of a just a light or a heavy chain polypeptide as set forth in TABLE 5.

[0354] In still another aspect, antigen-binding proteins containing the CDRs, variable domains and/or full length sequences listed in TABLES 3, 4A, 4B, and 5 is a monoclonal antibody, a chimeric antibody, a humanized antibody, a human antibody, a multispecific antibody, or an antibody fragment of the foregoing. In another embodiment, the antibody fragment of the isolated antigen-binding proteins provided herein is a Fab fragment, a Fab′ fragment, an F(ab)₂ fragment, an Fv fragment, a diabody, or a scFv based upon an antibody with the sequences as listed in TABLE 5.

[0355] In yet another aspect, the isolated antigen-binding protein provided in TABLE 5 can be coupled to a labeling group and can compete for binding to GIPR with an antigen binding protein of one of the isolated antigen-binding proteins provided herein.

[0356] In another embodiment, antigen binding proteins are provided that compete with one of the exemplified antibodies or functional fragments described above for specific binding to a human GIPR (e.g., SEQ ID NO: 3141). Such antigen binding proteins may bind to the same epitope as one of the antigen binding proteins described herein, or to an overlapping epitope. Antigen binding proteins and fragments that compete with the exemplified antigen binding proteins are expected to show similar functional properties. The exemplified antigen binding proteins and fragments include those described above, including those with heavy and light chains, variable region domains and CDRs included in TABLES 3, 4A, 4B, and 5. Thus, as a specific example, the antigen binding proteins that are provided include those that compete with an antibody having:
[0357] all 6 of the CDRs listed for any antibody listed in TABLES 4A and 4B;
[0358] a VH and a VL listed for any antibody listed in TABLE 3; or
[0359] two light chains and two heavy chains as specified for any antibody listed in TABLE 5.

[0360] The antigen binding proteins that are provided include monoclonal antibodies that bind to GIPR. Monoclonal antibodies may be produced using any technique known in the art, e.g., by immortalizing spleen cells harvested from the transgenic animal after completion of the immunization schedule. The spleen cells can be immortalized using any technique known in the art, e.g., by fusing them with myeloma cells to produce hybridomas. Myeloma cells for use in hybridoma-producing fusion procedures preferably are non-antibody-producing, have high fusion efficiency, and enzyme deficiencies that render them incapable of growing in certain selective media which support the growth of only the desired fused cells (hybridomas). Examples of suitable cell lines for use in mouse fusions include Sp-20, P3-X63/Ag8, P3-X63-Ag8.653, NS1/1.Ag 4 1, Sp210-Ag14, FO, NSO/U, MPC-11, MPCI1-X45-GTG 1.7 and S194/5XXO Bul; examples of cell lines used in rat fusions include R210.RCY3, Y3-Ag 1.2.3, IR983F and 4B210. Other cell lines useful for cell fusions are U-266, GM1500-GRG2, LICR-LON-HMy2 and UC729-6.

[0361] In some instances, a hybridoma cell line is produced by immunizing an animal (e.g., a transgenic animal having human immunoglobulin sequences) with a GIPR immunogen; harvesting spleen cells from the immunized animal; fusing the harvested spleen cells to a myeloma cell line, thereby generating hybridoma cells; establishing hybridoma cell lines from the hybridoma cells, and identifying a hybridoma cell line that produces an antibody that binds a GIPR polypeptide. Such hybridoma cell lines, and anti-GIPR monoclonal antibodies produced by them, are aspects of the present application.

[0362] Monoclonal antibodies secreted by a hybridoma cell line can be purified using any technique known in the art. Hybridomas or mAbs may be further screened to identify mAbs with particular properties, such as the ability to increase GIPR activity.

[0363] Chimeric and humanized antibodies based upon the foregoing sequences are also provided. Monoclonal antibodies for use as therapeutic agents may be modified in various ways prior to use. One example is a chimeric antibody, which is an antibody composed of protein segments from different antibodies that are covalently joined to produce functional immunoglobulin light or heavy chains or immunologically functional portions thereof. Generally, a portion of the heavy chain and/or light chain is identical with or homologous to a corresponding sequence in antibodies derived from a particular species or belonging to a particular antibody class or subclass, while the remainder of the chain(s) is/are identical with or homologous to a corresponding sequence in antibodies derived from another species or belonging to another antibody class or subclass. For methods relating to chimeric antibodies, see, for example, U.S. Pat. No. 4,816,567; and Morrison et al., 1985, Proc. Natl. Acad. Sci. USA 81:6851-6855, which are hereby incorporated by reference. CDR grafting is described, for example, in U.S. Pat. Nos. 6,180,370, 5,693,762, 5,693,761, 5,585,089, and 5,530,101.

[0364] Generally, the goal of making a chimeric antibody is to create a chimera in which the number of amino acids from the intended patient species is maximized. One example is the “CDR-grafted” antibody, in which the antibody comprises one or more complementarity determining regions (CDRs) from a particular species or belonging to a particular antibody class or subclass, while the remainder of the antibody chain(s) is/are identical with or homologous to a corresponding sequence in antibodies derived from another species or belonging to another antibody class or subclass. For use in humans, the variable region or selected CDRs from a rodent antibody often are grafted into a human antibody, replacing the naturally-occurring variable regions or CDRs of the human antibody.

[0365] One useful type of chimeric antibody is a “humanized” antibody. Generally, a humanized antibody is produced from a monoclonal antibody raised initially in a non-human animal. Certain amino acid residues in this monoclonal antibody, typically from non-antigen recognizing portions of the antibody, are modified to be homologous to corresponding residues in a human antibody of corresponding isotype. Humanization can be performed, for example, using various methods by substituting at least a portion of a rodent variable region for the corresponding regions of a human antibody (see, e.g., U.S. Pat. Nos. 5,585,089, and 5,693,762; Jones et al., 1986, Nature 21:522-525; Riechmann et al., 1988, Nature 2:323-27; Verhoeyen et al., 1988, Science 29:1534-1536).

[0366] In one aspect, the CDRs of the light and heavy chain variable regions of the antibodies provided herein are grafted to framework regions (FRs) from antibodies from the same, or a different, phylogenetic species. For example, the CDRs of the heavy and light chain variable regions V_{H}1, V_{H}2, V_{H}3, V_{H}4, VHS, V_{H}6, V_{H}7, V_{H}8, V_{H}9, V_{H}10, V_{H}1, V_{H}12 and/or V_{L}1, and V_{L}2 can be grafted to consensus human FRs. To create consensus human FRs, FRs from several human heavy chain or light chain amino acid sequences may be aligned to identify a consensus amino acid sequence. In other embodiments, the FRs of a heavy chain or light chain disclosed herein are replaced with the FRs from a different heavy chain or light chain. In one aspect, rare amino acids in the FRs of the heavy and light chains of GIPR antibodies are not replaced, while the rest of the FR amino acids are replaced. A “rare amino acid” is a specific amino acid that is in a position in which this particular amino acid is not usually found in an FR. Alternatively, the grafted variable regions from the one heavy or light chain may be used with a constant region that is different from the constant region of that particular heavy or light chain as disclosed herein. In other embodiments, the grafted variable regions are part of a single chain Fv antibody.

[0367] In certain embodiments, constant regions from species other than human can be used along with the human variable region(s) to produce hybrid antibodies.

[0368] Fully human GIPR antibodies are also provided. Methods are available for making fully human antibodies specific for a given antigen without exposing human beings to the antigen (“fully human antibodies”). One specific means provided for implementing the production of fully human antibodies is the “humanization” of the mouse humoral immune system. Introduction of human immunoglobulin (Ig) loci into mice in which the endogenous Ig genes have been inactivated is one means of producing fully human monoclonal antibodies (mAbs) in mouse, an animal that can be immunized with any desirable antigen. Using fully human antibodies can minimize the immunogenic and allergic responses that can sometimes be caused by administering mouse or mouse-derived mAbs to humans as therapeutic agents.

[0369] Fully human antibodies can be produced by immunizing transgenic animals (usually mice) that are capable of producing a repertoire of human antibodies in the absence of endogenous immunoglobulin production. Antigens for this purpose typically have six or more contiguous amino acids, and optionally are conjugated to a carrier, such as a hapten. See, e.g., Jakobovits et al., 1993, Proc. Natl. Acad Sci. USA 90:2551-2555; Jakobovits et al., 1993, Nature 2:255-258; and Bruggermann et al., 1993, Year in Immunol. 7:33. In one example of such a method, transgenic animals are produced by incapacitating the endogenous mouse immunoglobulin loci encoding the mouse heavy and light immunoglobulin chains therein, and inserting into the mouse genome large fragments of human genome DNA containing loci that encode human heavy and light chain proteins. Partially modified animals, which have less than the full complement of human immunoglobulin loci, are then cross-bred to obtain an animal having all of the desired immune system modifications. When administered an immunogen, these transgenic animals produce antibodies that are immunospecific for the immunogen but have human rather than murine amino acid sequences, including the variable regions. For further details of such methods, see, for example, WO96/33735 and WO94/02602. Additional methods relating to transgenic mice for making human antibodies are described in U.S. Pat. Nos. 5,545,807; 6,713,610; 6,673,986; 6,162,963; 5,545,807; 6,300,129; 6,255,458; 5,877,397; 5,874,299 and 5,545,806; in PCT publications WO91/10741, WO90/04036, and in EP 546073B1 and EP 546073A1.

[0370] The transgenic mice described above, referred to herein as “HuMab” mice, contain a human immunoglobulin gene minilocus that encodes unrearranged human heavy ([mu] and [gamma]) and [kappa]light chain immunoglobulin sequences, together with targeted mutations that inactivate the endogenous [mu] and [kappa] chain loci (Lonberg et al., 1994, Nature 368:856-859). Accordingly, the mice exhibit reduced expression of mouse IgM or [kappa] and in response to immunization, and the introduced human heavy and light chain transgenes undergo class switching and somatic mutation to generate high affinity human IgG [kappa] monoclonal antibodies (Lonberg et al., supra.; Lonberg and Huszar, 1995, Intern. Rev. Immunol. 13: 65-93; Harding and Lonberg, 1995, Ann. N.Y Acad. Sci. 764:536-546). The preparation of HuMab mice is described in detail in Taylor et al., 1992, Nucleic Acids Research 20:6287-6295; Chen et al., 1993, International Immunology 5:647-656; Tuaillon et al., 1994, J. Immunol. 152:2912-2920; Lonberg et al., 1994, Nature 368:856-859; Lonberg, 1994, Handbook of Exp. Pharmacology 1U:49-101; Taylor et al., 1994, International Immunology 6:579-591; Lonberg and Huszar, 1995, Intern. Rev. Immunol. 11:65-93; Harding and Lonberg, 1995, Ann. N.Y Acad Sci. 764:536-546; Fishwild et al., 1996, Nature Biotechnology 4:845-851; the foregoing references are hereby incorporated by reference in their entirety for all purposes. See, further U.S. Pat. Nos. 5,545,806; 5,569,825; 5,625,126; 5,633,425; 5,789,650; 5,877,397; 5,661,016; 5,814,318; 5,874,299; and 5,770,429; as well as U.S. Pat. No. 5,545,807; International Publication Nos. WO 93/1227; WO 92/22646; and WO 92/03918, the disclosures of all of which are hereby incorporated by reference in their entirety for all purposes. Technologies utilized for producing human antibodies in these transgenic mice are disclosed also in WO 98/24893, and Mendez et al., 1997, Nature Genetics.:146-156, which are hereby incorporated by reference. For example, the HCo7 and HCo12 transgenic mice strains can be used to generate human monoclonal antibodies against GIPR. Further details regarding the production of human antibodies using transgenic mice are provided below.

[0371] Using hybridoma technology, antigen-specific human mAbs with the desired specificity can be produced and selected from the transgenic mice such as those described above. Such antibodies may be cloned and expressed using a suitable vector and host cell, or the antibodies can be harvested from cultured hybridoma cells.

[0372] Fully human antibodies can also be derived from phage-display libraries (as disclosed in Hoogenboom et al., 1991, J. Mol. Biol. 227:381; and Marks et al., 1991, J. Mol. Biol. 222:581). Phage display techniques mimic immune selection through the display of antibody repertoires on the surface of filamentous bacteriophage, and subsequent selection of phage by their binding to an antigen of choice. One such technique is described in PCT Publication No. WO 99/10494 (hereby incorporated by reference).

[0373] The GIPR binding protein can also be a variant, mimetic, derivative or oligomer based upon the structure of GIPR antigen binding proteins have the CDRs, variable regions and/or full length chains as described above.

[0374] In one embodiment, for instance, an antigen binding protein is a variant form of the antigen binding proteins disclosed above. For instance, some of the antigen binding proteins have one or more conservative amino acid substitutions in one or more of the heavy or light chains, variable regions or CDRs.

[0375] Naturally-occurring amino acids may be divided into classes based on common side chain properties:
[0376] 1) hydrophobic: norleucine, Met, Ala, Val, Leu, Ile;
[0377] 2) neutral hydrophilic: Cys, Ser, Thr, Asn, Gin;
[0378] 3) acidic: Asp, Glu;
[0379] 4) basic: His, Lys, Arg;
[0380] 5) residues that influence chain orientation: Gly, Pro; and
[0381] 6) aromatic: Trp, Tyr, Phe.

[0382] Conservative amino acid substitutions may involve exchange of a member of one of these classes with another member of the same class. Conservative amino acid substitutions may encompass non-naturally occurring amino acid residues, which are typically incorporated by chemical peptide synthesis rather than by synthesis in biological systems. These include peptidomimetics and other reversed or inverted forms of amino acid moieties.

[0383] Non-conservative substitutions may involve the exchange of a member of one of the above classes for a member from another class. Such substituted residues may be introduced into regions of the antibody that are homologous with human antibodies, or into the non-homologous regions of the molecule.

[0384] In making such changes, according to certain embodiments, the hydropathic index of amino acids may be considered. The hydropathic profile of a protein is calculated by assigning each amino acid a numerical value (“hydropathy index”) and then repetitively averaging these values along the peptide chain. Each amino acid has been assigned a hydropathic index on the basis of its hydrophobicity and charge characteristics. They are: isoleucine (+4.5); valine (+4.2); leucine (+3.8); phenylalanine (+2.8); cysteine/cystine (+2.5); methionine (+1.9); alanine (+1.8); glycine (−0.4); threonine (−0.7); serine (−0.8); tryptophan (−0.9); tyrosine (−1.3); proline (−1.6); histidine (−3.2); glutamate (−3.5); glutamine (−3.5); aspartate (−3.5); asparagine (−3.5); lysine (−3.9); and arginine (4.5).

[0385] The importance of the hydropathic profile in conferring interactive biological function on a protein is understood in the art (see, e.g., Kyte et al., 1982, J. Mol. Biol. 157:105-131). It is known that certain amino acids may be substituted for other amino acids having a similar hydropathic index or score and still retain a similar biological activity. In making changes based upon the hydropathic index, in certain embodiments, the substitution of amino acids whose hydropathic indices are within ±2 is included. In some aspects, those which are within ±1 are included, and in other aspects, those within ±0.5 are included.

[0386] It is also understood in the art that the substitution of like amino acids can be made effectively on the basis of hydrophilicity, particularly where the biologically functional protein or peptide thereby created is intended for use in immunological embodiments, as in the present case. In certain embodiments, the greatest local average hydrophilicity of a protein, as governed by the hydrophilicity of its adjacent amino acids, correlates with its immunogenicity and antigen-binding or immunogenicity, that is, with a biological property of the protein.

[0387] The following hydrophilicity values have been assigned to these amino acid residues: arginine (+3.0); lysine (+3.0); aspartate (+3.0±1); glutamate (+3.0±1); serine (+0.3); asparagine (+0.2); glutamine (+0.2); glycine (0); threonine (−0.4); proline (−0.5±1); alanine (−0.5); histidine (−0.5); cysteine (−1.0); methionine (−1.3); valine (−1.5); leucine (−1.8); isoleucine (−1.8); tyrosine (−2.3); phenylalanine (−2.5) and tryptophan (−3.4). In making changes based upon similar hydrophilicity values, in certain embodiments, the substitution of amino acids whose hydrophilicity values are within ±2 is included, in other embodiments, those which are within f 1 are included, and in still other embodiments, those within ±0.5 are included. In some instances, one may also identify epitopes from primary amino acid sequences on the basis of hydrophilicity. These regions are also referred to as “epitopic core regions.”

[0388] Exemplary conservative amino acid substitutions are set forth in Table 6.

TABLE 8
Conservative Amino Acid Substitutions

| Original Residue | Exemplary Substitutions |
|---|---|
| Ala | Ser |
| Arg | Lys |
| Asn | Gln, His |
| Asp | Glu |
| Cys | Ser |
| Gln | Asn |
| Glu | Asp |
| Gly | Pro |
| His | Asn, Gln |
| Ile | Leu, Val |
| Leu | Ile, Val |
| Lys | Arg, Gln, Glu |
| Met | Leu, Ile |
| Phe | Met, Leu, Tyr |
| Ser | Thr |
| Thr | Ser |
| Trp | Tyr |
| Tyr | Trp, Phe |
| Val | Ile, Leu |

[0389] A skilled artisan will be able to determine suitable variants of polypeptides as set forth herein using well-known techniques. One skilled in the art may identify suitable areas of the molecule that may be changed without destroying activity by targeting regions not believed to be important for activity. The skilled artisan also will be able to identify residues and portions of the molecules that are conserved among similar polypeptides. In further embodiments, even areas that may be important for biological activity or for structure may be subject to conservative amino acid substitutions without destroying the biological activity or without adversely affecting the polypeptide structure.

[0390] Additionally, one skilled in the art can review structure-function studies identifying residues in similar polypeptides that are important for activity or structure. In view of such a comparison, one can predict the importance of amino acid residues in a protein that correspond to amino acid residues important for activity or structure in similar proteins. One skilled in the art may opt for chemically similar amino acid substitutions for such predicted important amino acid residues.

[0391] One skilled in the art can also analyze the 3-dimensional structure and amino acid sequence in relation to that structure in similar polypeptides. In view of such information, one skilled in the art may predict the alignment of amino acid residues of an antibody with respect to its three dimensional structure. One skilled in the art may choose not to make radical changes to amino acid residues predicted to be on the surface of the protein, since such residues may be involved in important interactions with other molecules. Moreover, one skilled in the art may generate test variants containing a single amino acid substitution at each desired amino acid residue. These variants can then be screened using assays for GIPR activity, thus yielding information regarding which amino acids can be changed and which must not be changed. In other words, based on information gathered from such routine experiments, one skilled in the art can readily determine the amino acid positions where further substitutions should be avoided either alone or in combination with other mutations.

[0392] A number of scientific publications have been devoted to the prediction of secondary structure. See, Moult, 1996, Curr. Op. in Biotech. 7:422-427; Chou et al., 1974, Biochem. 13:222-245; Chou et al., 1974, Biochemistry 113:211-222; Chou et al., 1978, Adv. Enzymol. Relat. Areas Mol. Biol. 47:45-148; Chou et al., 1979, Ann. Rev. Biochem. 47:251-276; and Chou et al., 1979, Biophys. J. 26:367-384. Moreover, computer programs are currently available to assist with predicting secondary structure. One method of predicting secondary structure is based upon homology modeling. For example, two polypeptides or proteins that have a sequence identity of greater than 30%, or similarity greater than 40% can have similar structural topologies. The recent growth of the protein structural database (PDB) has provided enhanced predictability of secondary structure, including the potential number of folds within a polypeptide's or protein's structure. See, Holm et al., 1999, Nucl. Acid. Res. 27:244-247. It has been suggested (Brenner et al., 1997, Curr. Op. Struct. Biol. 7:369-376) that there are a limited number of folds in a given polypeptide or protein and that once a critical number of structures have been resolved, structural prediction will become dramatically more accurate.

[0393] Additional methods of predicting secondary structure include “threading” (Jones, 1997, Curr. Opin. Struct. Biol. 7:377-387; Sippl et al., 1996, Structure 4:15-19), “profile analysis” (Bowie et al., 1991, Science 253:164-170; Gribskov et al., 1990, Meth. Enzym. 183:146-159; Gribskov et al., 1987, Proc. Nat. Acad. Sci. 84:4355-4358), and “evolutionary linkage” (See, Holm, 1999, supra; and Brenner, 1997, supra).

[0394] In some embodiments, amino acid substitutions are made that: (1) reduce susceptibility to proteolysis, (2) reduce susceptibility to oxidation, (3) alter binding affinity for forming protein complexes, (4) alter ligand or antigen binding affinities, and/or (4) confer or modify other physicochemical or functional properties on such polypeptides. For example, single or multiple amino acid substitutions (in certain embodiments, conservative amino acid substitutions) may be made in the naturally-occurring sequence. Substitutions can be made in that portion of the antibody that lies outside the domain(s) forming intermolecular contacts). In such embodiments, conservative amino acid substitutions can be used that do not substantially change the structural characteristics of the parent sequence (e.g., one or more replacement amino acids that do not disrupt the secondary structure that characterizes the parent or native antigen binding protein). Examples of art-recognized polypeptide secondary and tertiary structures are described in Proteins, Structures and Molecular Principles (Creighton, Ed.), 1984, W. H. New York: Freeman and Company; Introduction to Protein Structure (Branden and Tooze, eds.), 1991, New York: Garland Publishing; and Thornton et al., 1991, Nature 354:105, which are each incorporated herein by reference.

[0395] Additional preferred antibody variants include cysteine variants wherein one or more cysteine residues in the parent or native amino acid sequence are deleted from or substituted with another amino acid (e.g., serine). Cysteine variants are useful, inter alia when antibodies must be refolded into a biologically active conformation. Cysteine variants may have fewer cysteine residues than the native antibody, and typically have an even number to minimize interactions resulting from unpaired cysteines.

[0396] The heavy and light chains, variable regions domains and CDRs that are disclosed can be used to prepare polypeptides that contain an antigen binding region that can specifically bind to GIPR. For example, one or more of the CDRs can be incorporated into a molecule (e.g., a polypeptide) covalently or noncovalently to make an immunoadhesion. An immunoadhesion may incorporate the CDR(s) as part of a larger polypeptide chain, may covalently link the CDR(s) to another polypeptide chain, or may incorporate the CDR(s) noncovalently. The CDR(s) enable the immunoadhesion to bind specifically to a particular antigen of interest (e.g., an GIPR polypeptide or epitope thereof).

[0397] Mimetics (e.g., “peptide mimetics” or “peptidomimetics”) based upon the variable region domains and CDRs that are described herein are also provided. These analogs can be peptides, non-peptides or combinations of peptide and non-peptide regions. Fauchere, 1986, Adv. Drug Res. 15:29; Veber and Freidinger, 1985, TINS p. 392; and Evans et al., 1987, J. Med. Chem. 30:1229, which are incorporated herein by reference for any purpose. Peptide mimetics that are structurally similar to therapeutically useful peptides may be used to produce a similar therapeutic or prophylactic effect. Such compounds are often developed with the aid of computerized molecular modeling. Generally, peptidomimetics are proteins that are structurally similar to an antibody displaying a desired biological activity, such as here the ability to specifically bind GIPR, but have one or more peptide linkages optionally replaced by a linkage selected from: —CH₂NH—, —CH₂S—, —CH₂—CH₂—, —CH—CH-(cis and trans), —COCH₂—, —CH(OH)CH₂—, and —CH₂SO—, by methods well known in the art. Systematic substitution of one or more amino acids of a consensus sequence with a D-amino acid of the same type (e.g., D-lysine in place of L-lysine) may be used in certain embodiments to generate more stable proteins. In addition, constrained peptides comprising a consensus sequence or a substantially identical consensus sequence variation may be generated by methods known in the art (Rizo and Gierasch, 1992, Ann. Rev. Biochem. 61:387), incorporated herein by reference), for example, by adding internal cysteine residues capable of forming intramolecular disulfide bridges which cyclize the peptide.

[0398] Derivatives of the antigen binding proteins that are described herein are also provided. The derivatized antigen binding proteins can comprise any molecule or substance that imparts a desired property to the antibody or fragment, such as increased half-life in a particular use. The derivatized antigen binding protein can comprise, for example, a detectable (or labeling) moiety (e.g., a radioactive, colorimetric, antigenic or enzymatic molecule, a detectable bead (such as a magnetic or electrodense (e.g., gold) bead), or a molecule that binds to another molecule (e.g., biotin or streptavidin)), a therapeutic or diagnostic moiety (e.g., a radioactive, cytotoxic, or pharmaceutically active moiety), or a molecule that increases the suitability of the antigen binding protein for a particular use (e.g., administration to a subject, such as a human subject, or other in vivo or in vitro uses). Examples of molecules that can be used to derivatize an antigen binding protein include albumin (e.g., human serum albumin) and polyethylene glycol (PEG). Albumin-linked and PEGylated derivatives of antigen binding proteins can be prepared using techniques well known in the art. Certain antigen binding proteins include a pegylated single chain polypeptide as described herein. In one embodiment, the antigen binding protein is conjugated or otherwise linked to transthyretin (TTR) or a TTR variant. The TTR or TTR variant can be chemically modified with, for example, a chemical selected from the group consisting of dextran, poly(n-vinyl pyrrolidone), polyethylene glycols, propropylene glycol homopolymers, polypropylene oxide/ethylene oxide co-polymers, polyoxyethylated polyols and polyvinyl alcohols.

[0399] Other derivatives include covalent or aggregative conjugates of GIPR antigen binding proteins with other proteins or polypeptides, such as by expression of recombinant fusion proteins comprising heterologous polypeptides fused to the N-terminus or C-terminus of an GIPR antigen binding protein. For example, the conjugated peptide may be a heterologous signal (or leader) polypeptide, e.g., the yeast alpha-factor leader, or a peptide such as an epitope tag. GIPR antigen binding protein-containing fusion proteins can comprise peptides added to facilitate purification or identification of the GIPR antigen binding protein (e.g., poly-His). A GIPR antigen binding protein also can be linked to the FLAG peptide as described in Hopp et al., 1988, Bio Technology 6:1204; and U.S. Pat. No. 5,011,912. The FLAG peptide is highly antigenic and provides an epitope reversibly bound by a specific monoclonal antibody (mAb), enabling rapid assay and facile purification of expressed recombinant protein. Reagents useful for preparing fusion proteins in which the FLAG peptide is fused to a given polypeptide are commercially available (Sigma, St. Louis, MO).

[0400] In some embodiments, the antigen binding protein comprises one or more labels. The term “labeling group” or “label” means any detectable label. Examples of suitable labeling groups include, but are not limited to, the following: radioisotopes or radionuclides (e.g., ³H, ¹⁴C, ¹⁵N, ³⁵S ⁹⁰Y, ⁹⁹Tc, ¹¹¹In, ¹²⁵, ¹³¹I) fluorescent groups (e.g., FITC, rhodamine, lanthanide phosphors), enzymatic groups (e.g., horseradish peroxidase, β-galactosidase, luciferase, alkaline phosphatase), chemiluminescent groups, biotinyl groups, or predetermined polypeptide epitopes recognized by a secondary reporter (e.g., leucine zipper pair sequences, binding sites for secondary antibodies, metal binding domains, epitope tags). In some embodiments, the labeling group is coupled to the antigen binding protein via spacer arms of various lengths to reduce potential steric hindrance. Various methods for labeling proteins are known in the art and may be used as is seen fit.

[0401] The term “effector group” means any group coupled to an antigen binding protein that acts as a cytotoxic agent. Examples for suitable effector groups are radioisotopes or radionuclides (e.g., ³H, ¹⁴C ¹⁵N, ³⁵S, ⁹⁰Y, ⁹⁹Tc, ¹¹¹In, ¹²⁵, ¹³¹I). Other suitable groups include toxins, therapeutic groups, or chemotherapeutic groups. Examples of suitable groups include calicheamicin, auristatins, geldanamycin and maytansine. In some embodiments, the effector group is coupled to the antigen binding protein via spacer arms of various lengths to reduce potential steric hindrance.

[0402] In general, labels fall into a variety of classes, depending on the assay in which they are to be detected: a) isotopic labels, which may be radioactive or heavy isotopes; b) magnetic labels (e.g., magnetic particles); c) redox active moieties; d) optical dyes; enzymatic groups (e.g. horseradish peroxidase, β-galactosidase, luciferase, alkaline phosphatase); e) biotinylated groups; and f) predetermined polypeptide epitopes recognized by a secondary reporter (e.g., leucine zipper pair sequences, binding sites for secondary antibodies, metal binding domains, epitope tags, etc.). In some embodiments, the labeling group is coupled to the antigen binding protein via spacer arms of various lengths to reduce potential steric hindrance. Various methods for labeling proteins are known in the art.

[0403] Specific labels include optical dyes, including, but not limited to, chromophores, phosphors and fluorophores, with the latter being specific in many instances. Fluorophores can be either “small molecule” fluores, or proteinaceous fluores.

[0404] By “fluorescent label” is meant any molecule that may be detected via its inherent fluorescent properties. Suitable fluorescent labels include, but are not limited to, fluorescein, rhodamine, tetramethylrhodamine, eosin, erythrosin, coumarin, methyl-coumarins, pyrene, Malacite green, stilbene, Lucifer Yellow, Cascade BlueJ, Texas Red, IAEDANS, EDANS, BODIPY FL, LC Red 640, Cy 5, Cy 5.5, LC Red 705, Oregon green, the Alexa-Fluor dyes (Alexa Fluor 350, Alexa Fluor 430, Alexa Fluor 488, Alexa Fluor 546, Alexa Fluor 568, Alexa Fluor 594, Alexa Fluor 633, Alexa Fluor 660, Alexa Fluor 680), Cascade Blue, Cascade Yellow and R-phycoerythrin (PE) (Molecular Probes, Eugene, OR), FITC, Rhodamine, and Texas Red (Pierce, Rockford, IL), Cy5, Cy5.5, Cy7 (Amersham Life Science, Pittsburgh, PA). Suitable optical dyes, including fluorophores, are described in Molecular Probes Handbook by Richard P. Haugland, hereby expressly incorporated by reference.

[0405] Suitable proteinaceous fluorescent labels also include, but are not limited to, green fluorescent protein, including a Renilla, Ptilosarcus, or Aequorea species of GFP (Chalfie et al., 1994, Science 263:802-805), EGFP (Clontech Labs., Inc., Genbank Accession Number U55762), blue fluorescent protein (BFP, Quantum Biotechnologies, Inc., Quebec, Canada; Stauber, 1998, Biotechniques 24:462-471; Heim et al., 1996, Curr. Biol. 6:178-182), enhanced yellow fluorescent protein (EYFP, Clontech Labs., Inc.), luciferase (Ichiki et al., 1993, J. Immunol. 150:5408-5417), β galactosidase (Nolan et al., 1988, Proc. Natl. Acad. Sci. U.S.A. 85:2603-2607) and Renilla (WO92/15673, WO95/07463, WO98/14605, WO98/26277, WO99/49019, U.S. Pat. Nos. 5,292,658, 5,418,155, 5,683,888, 5,741,668, 5,777,079, 5,804,387, 5,874,304, 5,876,995, 5,925,558).

[0406] Nucleic acids that encode for the antigen binding proteins described herein, or portions thereof, are also provided, including nucleic acids encoding one or both chains of an antibody, or a fragment, derivative, mutein, or variant thereof, polynucleotides encoding heavy chain variable regions or only CDRs, polynucleotides sufficient for use as hybridization probes, PCR primers or sequencing primers for identifying, analyzing, mutating or amplifying a polynucleotide encoding a polypeptide, anti-sense nucleic acids for inhibiting expression of a polynucleotide, and complementary sequences of the foregoing. The nucleic acids can be any length. They can be, for example, 5, 10, 15, 20, 25, 30, 35, 40, 45, 50, 75, 100, 125, 150, 175, 200, 250, 300, 350, 400, 450, 500, 750, 1,000, 1,500, 3,000, 5,000 or more nucleotides in length, and/or can comprise one or more additional sequences, for example, regulatory sequences, and/or be part of a larger nucleic acid, for example, a vector. The nucleic acids can be single-stranded or double-stranded and can comprise RNA and/or DNA nucleotides, and artificial variants thereof (e.g., peptide nucleic acids). Any variable region provided herein may be attached to these constant regions to form complete heavy and light chain sequences. However, it should be understood that these constant regions sequences are provided as specific examples only. In some embodiments, the variable region sequences are joined to other constant region sequences that are known in the art.

[0407] Nucleic acids encoding certain antigen binding proteins, or portions thereof (e.g., full length antibody, heavy or light chain, variable domain, or CDRH1, CDRH2, CDRH3, CDRL1, CDRL2, or CDRL3) may be isolated from B-cells of mice that have been immunized with GIPR or an immunogenic fragment thereof. The nucleic acid may be isolated by conventional procedures such as polymerase chain reaction (PCR). Phage display is another example of a known technique whereby derivatives of antibodies and other antigen binding proteins may be prepared. In one approach, polypeptides that are components of an antigen binding protein of interest are expressed in any suitable recombinant expression system, and the expressed polypeptides are allowed to assemble to form antigen binding proteins.

[0408] An aspect further provides nucleic acids that hybridize to other nucleic acids under particular hybridization conditions. Methods for hybridizing nucleic acids are well-known in the art. See, e.g., Current Protocols in Molecular Biology, John Wiley & Sons, N.Y. (1989), 6.3.1-6.3.6. As defined herein, a moderately stringent hybridization condition uses a prewashing solution containing 5x sodium chloride/sodium citrate (SSC), 0.5% SDS, 1.0 mM EDTA (pH 8.0), hybridization buffer of about 50% formamide, 6×SSC, and a hybridization temperature of 55° C. (or other similar hybridization solutions, such as one containing about 50% formamide, with a hybridization temperature of 42° C.), and washing conditions of 60° C., in 0.5×SSC, 0.1% SDS. A stringent hybridization condition hybridizes in 6×SSC at 45° C., followed by one or more washes in 0.1×SSC, 0.2% SDS at 68° C. Furthermore, one of skill in the art can manipulate the hybridization and/or washing conditions to increase or decrease the stringency of hybridization such that nucleic acids comprising nucleotide sequences that are at least 65%, 70%, 75%, 80%, 85%, 90%, 95%, 98% or 99% identical to each other typically remain hybridized to each other.

[0409] The basic parameters affecting the choice of hybridization conditions and guidance for devising suitable conditions are set forth by, for example, Sambrook, Fritsch, and Maniatis (2001, Molecular Cloning: A Laboratory Manual, Cold Spring Harbor Laboratory Press, Cold Spring Harbor, N.Y., supra; and Current Protocols in Molecular Biology, 1995, Ausubel et al., eds., John Wiley & Sons, Inc., sections 2.10 and 6.3-6.4), and can be readily determined by those having ordinary skill in the art based on, e.g., the length and/or base composition of the nucleic acid.

[0410] Changes can be introduced by mutation into a nucleic acid, thereby leading to changes in the amino acid sequence of a polypeptide (e.g., an antibody or antibody derivative) that it encodes. Mutations can be introduced using any technique known in the art. In one embodiment, one or more particular amino acid residues are changed using, for example, a site-directed mutagenesis protocol. In another embodiment, one or more randomly selected residues is changed using, for example, a random mutagenesis protocol. However it is made, a mutant polypeptide can be expressed and screened for a desired property.

[0411] Mutations can be introduced into a nucleic acid without significantly altering the biological activity of a polypeptide that it encodes. For example, one can make nucleotide substitutions leading to amino acid substitutions at non-essential amino acid residues. Alternatively, one or more mutations can be introduced into a nucleic acid that selectively changes the biological activity of a polypeptide that it encodes. For example, the mutation can quantitatively or qualitatively change the biological activity. Examples of quantitative changes include increasing, reducing or eliminating the activity. Examples of qualitative changes include changing the antigen specificity of an antibody. In one embodiment, a nucleic acid encoding any antigen binding protein described herein can be mutated to alter the amino acid sequence using molecular biology techniques that are well-established in the art.

[0412] Another aspect provides nucleic acid molecules that are suitable for use as primers or hybridization probes for the detection of nucleic acid sequences. A nucleic acid molecule can comprise only a portion of a nucleic acid sequence encoding a full-length polypeptide, for example, a fragment that can be used as a probe or primer or a fragment encoding an active portion of a polypeptide.

[0413] Probes based on the sequence of a nucleic acid can be used to detect the nucleic acid or similar nucleic acids, for example, transcripts encoding a polypeptide. The probe can comprise a label group, e.g., a radioisotope, a fluorescent compound, an enzyme, or an enzyme co-factor. Such probes can be used to identify a cell that expresses the polypeptide.

[0414] Another aspect provides vectors comprising a nucleic acid encoding a polypeptide or a portion thereof (e.g., a fragment containing one or more CDRs or one or more variable region domains). Examples of vectors include, but are not limited to, plasmids, viral vectors, non-episomal mammalian vectors and expression vectors, for example, recombinant expression vectors. The recombinant expression vectors can comprise a nucleic acid in a form suitable for expression of the nucleic acid in a host cell. The recombinant expression vectors include one or more regulatory sequences, selected on the basis of the host cells to be used for expression, which is operably linked to the nucleic acid sequence to be expressed. Regulatory sequences include those that direct constitutive expression of a nucleotide sequence in many types of host cells (e.g., SV40 early gene enhancer, Rous sarcoma virus promoter and cytomegalovirus promoter), those that direct expression of the nucleotide sequence only in certain host cells (e.g., tissue-specific regulatory sequences, see, Voss et al., 1986, Trends Biochem. Sci. 11:287, Maniatis et al., 1987, Science 236:1237, incorporated by reference herein in their entireties), and those that direct inducible expression of a nucleotide sequence in response to particular treatment or condition (e.g., the metallothionin promoter in mammalian cells and the tet-responsive and/or streptomycin responsive promoter in both prokaryotic and eukaryotic systems (see, id.). It will be appreciated by those skilled in the art that the design of the expression vector can depend on such factors as the choice of the host cell to be transformed, the level of expression of protein desired, etc. The expression vectors can be introduced into host cells to thereby produce proteins or peptides, including fusion proteins or peptides, encoded by nucleic acids as described herein.

[0415] Another aspect provides host cells into which a recombinant expression vector has been introduced. A host cell can be any prokaryotic cell (for example, E. coli) or eukaryotic cell (for example, yeast, insect, or mammalian cells (e.g., CHO cells)). Vector DNA can be introduced into prokaryotic or eukaryotic cells via conventional transformation or transfection techniques. For stable transfection of mammalian cells, it is known that, depending upon the expression vector and transfection technique used, only a small fraction of cells may integrate the foreign DNA into their genome. In order to identify and select these integrants, a gene that encodes a selectable marker (e.g., for resistance to antibiotics) is generally introduced into the host cells along with the gene of interest. Preferred selectable markers include those which confer resistance to drugs, such as G418, hygromycin and methotrexate. Cells stably transfected with the introduced nucleic acid can be identified by drug selection (e.g., cells that have incorporated the selectable marker gene will survive, while the other cells die), among other methods.

[0416] Expression systems and constructs in the form of plasmids, expression vectors, transcription or expression cassettes that comprise at least one polynucleotide as described above are also provided herein, as well host cells comprising such expression systems or constructs.

[0417] The antigen binding proteins provided herein may be prepared by any of a number of conventional techniques. For example, GIPR antigen binding proteins may be produced by recombinant expression systems, using any technique known in the art. See, e.g., Monoclonal Antibodies, Hybridomas: A New Dimension in Biological Analyses, Kennet et al. (eds.) Plenum Press, New York (1980); and Antibodies: A Laboratory Manual, Harlow and Lane (eds.), Cold Spring Harbor Laboratory Press, Cold Spring Harbor, N.Y. (1988).

[0418] Antigen binding proteins can be expressed in hybridoma cell lines (e.g., in particular antibodies may be expressed in hybridomas) or in cell lines other than hybridomas. Expression constructs encoding the antibodies can be used to transform a mammalian, insect or microbial host cell. Transformation can be performed using any known method for introducing polynucleotides into a host cell, including, for example packaging the polynucleotide in a virus or bacteriophage and transducing a host cell with the construct by transfection procedures known in the art, as exemplified by U.S. Pat. Nos. 4,399,216; 4,912,040; 4,740,461; 4,959,455. The optimal transformation procedure used will depend upon which type of host cell is being transformed. Methods for introduction of heterologous polynucleotides into mammalian cells are well known in the art and include, but are not limited to, dextran-mediated transfection, calcium phosphate precipitation, polybrene mediated transfection, protoplast fusion, electroporation, encapsulation of the polynucleotide(s) in liposomes, mixing nucleic acid with positively-charged lipids, and direct microinjection of the DNA into nuclei.

[0419] Recombinant expression constructs typically comprise a nucleic acid molecule encoding a polypeptide comprising one or more of the following: one or more CDRs provided herein; a light chain constant region; a light chain variable region; a heavy chain constant region (e.g., C_{H}1, C_{H}2 and/or C_{H}3); and/or another scaffold portion of a GIPR antigen binding protein. These nucleic acid sequences are inserted into an appropriate expression vector using standard ligation techniques. In one embodiment, the heavy or light chain constant region is appended to the C-terminus of the anti-GIPR specific heavy or light chain variable region and is ligated into an expression vector. The vector is typically selected to be functional in the particular host cell employed (i.e., the vector is compatible with the host cell machinery, permitting amplification and/or expression of the gene can occur). In some embodiments, vectors are used that employ protein-fragment complementation assays using protein reporters, such as dihydrofolate reductase (see, for example, U.S. Pat. No. 6,270,964, which is hereby incorporated by reference). Suitable expression vectors can be purchased, for example, from Invitrogen Life Technologies or BD Biosciences (formerly “Clontech”). Other useful vectors for cloning and expressing the antibodies and fragments include those described in Bianchi and McGrew, 2003, Biotech. Biotechnol. Bioeng. 84:439-44, which is hereby incorporated by reference. Additional suitable expression vectors are discussed, for example, in Methods Enzymol., vol. 185 (D. V. Goeddel, ed.), 1990, New York: Academic Press.

[0420] Typically, expression vectors used in any of the host cells will contain sequences for plasmid maintenance and for cloning and expression of exogenous nucleotide sequences. Such sequences, collectively referred to as “flanking sequences” in certain embodiments will typically include one or more of the following nucleotide sequences: a promoter, one or more enhancer sequences, an origin of replication, a transcriptional termination sequence, a complete intron sequence containing a donor and acceptor splice site, a sequence encoding a leader sequence for polypeptide secretion, a ribosome binding site, a polyadenylation sequence, a polylinker region for inserting the nucleic acid encoding the polypeptide to be expressed, and a selectable marker element. Each of these sequences is discussed below.

[0421] Optionally, the vector may contain a “tag”-encoding sequence, i.e., an oligonucleotide molecule located at the 5′ or 3′ end of the GIPR antigen binding protein coding sequence; the oligonucleotide sequence encodes polyHis (such as hexaHis), or another “tag” such as FLAG®, HA (hemaglutinin influenza virus), or myc, for which commercially available antibodies exist. This tag is typically fused to the polypeptide upon expression of the polypeptide, and can serve as a means for affinity purification or detection of the GIPR antigen binding protein from the host cell. Affinity purification can be accomplished, for example, by column chromatography using antibodies against the tag as an affinity matrix. Optionally, the tag can subsequently be removed from the purified GIPR antigen binding protein by various means such as using certain peptidases for cleavage.

[0422] Flanking sequences may be homologous (i.e., from the same species and/or strain as the host cell), heterologous (i.e., from a species other than the host cell species or strain), hybrid (i.e., a combination of flanking sequences from more than one source), synthetic or native. As such, the source of a flanking sequence may be any prokaryotic or eukaryotic organism, any vertebrate or invertebrate organism, or any plant, provided that the flanking sequence is functional in, and can be activated by, the host cell machinery.

[0423] Flanking sequences useful in the vectors may be obtained by any of several methods well known in the art. Typically, flanking sequences useful herein will have been previously identified by mapping and/or by restriction endonuclease digestion and can thus be isolated from the proper tissue source using the appropriate restriction endonucleases. In some cases, the full nucleotide sequence of a flanking sequence may be known. Here, the flanking sequence may be synthesized using the methods described herein for nucleic acid synthesis or cloning.

[0424] Whether all or only a portion of the flanking sequence is known, it may be obtained using polymerase chain reaction (PCR) and/or by screening a genomic library with a suitable probe such as an oligonucleotide and/or flanking sequence fragment from the same or another species. Where the flanking sequence is not known, a fragment of DNA containing a flanking sequence may be isolated from a larger piece of DNA that may contain, for example, a coding sequence or even another gene or genes. Isolation may be accomplished by restriction endonuclease digestion to produce the proper DNA fragment followed by isolation using agarose gel purification, Qiagen® column chromatography (Chatsworth, CA), or other methods known to the skilled artisan. The selection of suitable enzymes to accomplish this purpose will be readily apparent to one of ordinary skill in the art.

[0425] An origin of replication is typically a part of those prokaryotic expression vectors purchased commercially, and the origin aids in the amplification of the vector in a host cell. If the vector of choice does not contain an origin of replication site, one may be chemically synthesized based on a known sequence, and ligated into the vector. For example, the origin of replication from the plasmid pBR322 (New England Biolabs, Beverly, MA) is suitable for most gram-negative bacteria, and various viral origins (e.g., SV40, polyoma, adenovirus, vesicular stomatitus virus (VSV), or papillomaviruses such as HPV or BPV) are useful for cloning vectors in mammalian cells. Generally, the origin of replication component is not needed for mammalian expression vectors (for example, the SV40 origin is often used only because it also contains the virus early promoter).

[0426] A transcription termination sequence is typically located 3′ to the end of a polypeptide coding region and serves to terminate transcription. Usually, a transcription termination sequence in prokaryotic cells is a G-C rich fragment followed by a poly-T sequence. While the sequence is easily cloned from a library or even purchased commercially as part of a vector, it can also be readily synthesized using methods for nucleic acid synthesis such as those described herein.

[0427] A selectable marker gene encodes a protein necessary for the survival and growth of a host cell grown in a selective culture medium. Typical selection marker genes encode proteins that (a) confer resistance to antibiotics or other toxins, e.g., ampicillin, tetracycline, or kanamycin for prokaryotic host cells; (b) complement auxotrophic deficiencies of the cell; or (c) supply critical nutrients not available from complex or defined media. Specific selectable markers are the kanamycin resistance gene, the ampicillin resistance gene, and the tetracycline resistance gene. Advantageously, a neomycin resistance gene may also be used for selection in both prokaryotic and eukaryotic host cells.

[0428] Other selectable genes may be used to amplify the gene that will be expressed. Amplification is the process wherein genes that are required for production of a protein critical for growth or cell survival are reiterated in tandem within the chromosomes of successive generations of recombinant cells. Examples of suitable selectable markers for mammalian cells include dihydrofolate reductase (DHFR) and promoterless thyrnidine kinase genes. Mammalian cell transformants are placed under selection pressure wherein only the transformants are uniquely adapted to survive by virtue of the selectable gene present in the vector. Selection pressure is imposed by culturing the transformed cells under conditions in which the concentration of selection agent in the medium is successively increased, thereby leading to the amplification of both the selectable gene and the DNA that encodes another gene, such as an antigen binding protein that binds GIPR polypeptide. As a result, increased quantities of a polypeptide such as an antigen binding protein are synthesized from the amplified DNA.

[0429] A ribosome-binding site is usually necessary for translation initiation of mRNA and is characterized by a Shine-Dalgarno sequence (prokaryotes) or a Kozak sequence (eukaryotes). The element is typically located 3′ to the promoter and 5′ to the coding sequence of the polypeptide to be expressed.

[0430] In some cases, such as where glycosylation is desired in a eukaryotic host cell expression system, one may manipulate the various pre- or pro-sequences to improve glycosylation or yield. For example, one may alter the peptidase cleavage site of a particular signal peptide, or add prosequences, which also may affect glycosylation. The final protein product may have, in the −1 position (relative to the first amino acid of the mature protein), one or more additional amino acids incident to expression, which may not have been totally removed. For example, the final protein product may have one or two amino acid residues found in the peptidase cleavage site, attached to the amino-terminus. Alternatively, use of some enzyme cleavage sites may result in a slightly truncated form of the desired polypeptide, if the enzyme cuts at such area within the mature polypeptide.

[0431] Expression and cloning will typically contain a promoter that is recognized by the host organism and operably linked to the molecule encoding the GIPR antigen binding protein. Promoters are untranscribed sequences located upstream (i.e., 5′) to the start codon of a structural gene (generally within about 100 to 1000 bp) that control transcription of the structural gene. Promoters are conventionally grouped into one of two classes: inducible promoters and constitutive promoters. Inducible promoters initiate increased levels of transcription from DNA under their control in response to some change in culture conditions, such as the presence or absence of a nutrient or a change in temperature. Constitutive promoters, on the other hand, uniformly transcribe a gene to which they are operably linked, that is, with little or no control over gene expression. A large number of promoters, recognized by a variety of potential host cells, are well known. A suitable promoter is operably linked to the DNA encoding heavy chain or light chain comprising a GIPR antigen binding protein by removing the promoter from the source DNA by restriction enzyme digestion and inserting the desired promoter sequence into the vector.

[0432] Suitable promoters for use with yeast hosts are also well known in the art. Yeast enhancers are advantageously used with yeast promoters. Suitable promoters for use with mammalian host cells are well known and include, but are not limited to, those obtained from the genomes of viruses such as polyoma virus, fowlpox virus, adenovirus (such as Adenovirus 2), bovine papilloma virus, avian sarcoma virus, cytomegalovirus, retroviruses, hepatitis-B virus, and Simian Virus 40 (SV40). Other suitable mammalian promoters include heterologous mammalian promoters, for example, heat-shock promoters and the actin promoter.

[0433] An enhancer sequence may be inserted into the vector to increase transcription of DNA encoding light chain or heavy chain comprising a GIPR antigen binding protein by higher eukaryotes. Enhancers are cis-acting elements of DNA, usually about 10-300 bp in length, that act on the promoter to increase transcription. Enhancers are relatively orientation and position independent, having been found at positions both 5′ and 3′ to the transcription unit. Several enhancer sequences available from mammalian genes are known (e.g., globin, elastase, albumin, alpha-feto-protein and insulin). Typically, however, an enhancer from a virus is used. The SV40 enhancer, the cytomegalovirus early promoter enhancer, the polyoma enhancer, and adenovirus enhancers known in the art are exemplary enhancing elements for the activation of eukaryotic promoters. While an enhancer may be positioned in the vector either 5′ or 3′ to a coding sequence, it is typically located at a site 5′ from the promoter. A sequence encoding an appropriate native or heterologous signal sequence (leader sequence or signal peptide) can be incorporated into an expression vector, to promote extracellular secretion of the antibody. The choice of signal peptide or leader depends on the type of host cells in which the antibody is to be produced, and a heterologous signal sequence can replace the native signal sequence. Examples of signal peptides that are functional in mammalian host cells include the following: the signal sequence for interleukin-7 (IL-7) described in U.S. Pat. No. 4,965,195; the signal sequence for interleukin-2 receptor described in Cosman et al., 1984, Nature 312:768; the interleukin-4 receptor signal peptide described in EP Patent No. 0367 566; the type I interleukin-1 receptor signal peptide described in U.S. Pat. No. 4,968,607; the type II interleukin-1 receptor signal peptide described in EP Patent No. 0 460 846.

[0434] In one embodiment the leader sequence comprises SEQ ID NO: 3157 (MDMRVPAQLL GLLLLWLRGA RC) which is encoded by SEQ ID NO: 3158 (atggacatga gagtgcctgc acagctgctg ggcctgctgc tgctgtggct gagaggcgcc agatgc). In another embodiment the leader sequence comprises SEQ ID NO: 3159 (MAWALLLLTL LTQGTGSWA) which is encoded by SEQ ID NO: 3160 (atggcctggg ctctgctgct cctcaccctc ctcactcagg gcacagggtc ctgggcc).

[0435] The expression vectors that are provided may be constructed from a starting vector such as a commercially available vector. Such vectors may or may not contain all of the desired flanking sequences. Where one or more of the flanking sequences described herein are not already present in the vector, they may be individually obtained and ligated into the vector. Methods used for obtaining each of the flanking sequences are well known to one skilled in the art.

[0436] After the vector has been constructed and a nucleic acid molecule encoding light chain, a heavy chain, or a light chain and a heavy chain comprising a GIPR antigen binding sequence has been inserted into the proper site of the vector, the completed vector may be inserted into a suitable host cell for amplification and/or polypeptide expression. The transformation of an expression vector for an antigen-binding protein into a selected host cell may be accomplished by well-known methods including transfection, infection, calcium phosphate co-precipitation, electroporation, microinjection, lipofection, DEAE-dextran mediated transfection, or other known techniques. The method selected will in part be a function of the type of host cell to be used. These methods and other suitable methods are well known to the skilled artisan, and are set forth, for example, in Sambrook et al., 2001, supra.

[0437] A host cell, when cultured under appropriate conditions, synthesizes an antigen binding protein that can subsequently be collected from the culture medium (if the host cell secretes it into the medium) or directly from the host cell producing it (if it is not secreted). The selection of an appropriate host cell will depend upon various factors, such as desired expression levels, polypeptide modifications that are desirable or necessary for activity (such as glycosylation or phosphorylation) and ease of folding into a biologically active molecule.

[0438] Mammalian cell lines available as hosts for expression are well known in the art and include, but are not limited to, immortalized cell lines available from the American Type Culture Collection (ATCC), including but not limited to Chinese hamster ovary (CHO) cells, HeLa cells, baby hamster kidney (BHK) cells, monkey kidney cells (COS), human hepatocellular carcinoma cells (e.g., Hep G2), and a number of other cell lines. In certain embodiments, cell lines may be selected through determining which cell lines have high expression levels and constitutively produce antigen binding proteins with GIPR binding properties. In another embodiment, a cell line from the B cell lineage that does not make its own antibody but has a capacity to make and secrete a heterologous antibody can be selected.

[0439] In one embodiment, the present invention is directed to an antigen binding protein produced by a cell expressing one or more of the polynucleotides identified in Tables 2, 3, 4, and 5.

[0440] In one aspect, a GIPR binding protein is administered for chronic treatment. In another aspect, the binding proteins are administered for acute therapy.

[0441] Pharmaceutical compositions that comprise a GIPR antigen binding protein are also provided and can be utilized in any of the preventive and therapeutic methods disclosed herein. In an embodiment, a therapeutically effective amount of one or a plurality of the antigen binding proteins and a pharmaceutically acceptable diluent, carrier, solubilizer, emulsifier, preservative, and/or adjuvant are also provided. Acceptable formulation materials are nontoxic to recipients at the dosages and concentrations employed.

[0442] In certain embodiments, the pharmaceutical composition may contain formulation materials for modifying, maintaining or preserving, for example, the pH, osmolarity, viscosity, clarity, color, isotonicity, odor, sterility, stability, rate of dissolution or release, adsorption or penetration of the composition. In such embodiments, suitable formulation materials include, but are not limited to, amino acids (such as glycine, glutamine, asparagine, arginine or lysine); antimicrobials; antioxidants (such as ascorbic acid, sodium sulfite or sodium hydrogen-sulfite); buffers (such as borate, bicarbonate, Tris-HCl, citrates, phosphates or other organic acids); bulking agents (such as mannitol or glycine); chelating agents (such as ethylenediamine tetraacetic acid (EDTA)); complexing agents (such as caffeine, polyvinylpyrrolidone, beta-cyclodextrin or hydroxypropyl-beta-cyclodextrin); fillers; monosaccharides; disaccharides; and other carbohydrates (such as glucose, mannose or dextrins); proteins (such as serum albumin, gelatin or immunoglobulins); coloring, flavoring and diluting agents; emulsifying agents; hydrophilic polymers (such as polyvinylpyrrolidone); low molecular weight polypeptides; salt-forming counterions (such as sodium); preservatives (such as benzalkonium chloride, benzoic acid, salicylic acid, thimerosal, phenethyl alcohol, methylparaben, propylparaben, chlorhexidine, sorbic acid or hydrogen peroxide); solvents (such as glycerin, propylene glycol or polyethylene glycol); sugar alcohols (such as mannitol or sorbitol); suspending agents; surfactants or wetting agents (such as pluronics, PEG, sorbitan esters, polysorbates such as polysorbate 20, polysorbate, triton, tromethamine, lecithin, cholesterol, tyloxapal); stability enhancing agents (such as sucrose or sorbitol); tonicity enhancing agents (such as alkali metal halides, preferably sodium or potassium chloride, mannitol sorbitol); delivery vehicles; diluents; excipients and/or pharmaceutical adjuvants. REMINGTON'S PHARMACEUTICAL SCIENCES, 18″ Edition, (A. R. Genrmo, ed.), 1990, Mack Publishing Company provides additional details and options for suitable agents that can be incorporated into the pharmaceutical compositions.

[0443] In certain embodiments, the optimal pharmaceutical composition will be determined by one skilled in the art depending upon, for example, the intended route of administration, delivery format and desired dosage. See, for example, REMINGTON'S PHARMACEUTICAL SCIENCES, supra. In certain embodiments, such compositions may influence the physical state, stability, rate of in vivo release and rate of in vivo clearance of the antigen binding proteins disclosed. In certain embodiments, the primary vehicle or carrier in a pharmaceutical composition may be either aqueous or non-aqueous in nature. For example, a suitable vehicle or carrier may be water for injection or physiological saline solution. In certain embodiments, GIPR antigen binding protein compositions may be prepared for storage by mixing the selected composition having the desired degree of purity with optional formulation agents (REMINGTON'S PHARMACEUTICAL SCIENCES, supra) in the form of a lyophilized cake or an aqueous solution. Further, in certain embodiments, the GIPR antigen binding protein may be formulated as a lyophilizate using appropriate excipients such as sucrose.

[0444] The pharmaceutical compositions can be selected for parenteral delivery. Alternatively, the compositions may be selected for inhalation or for delivery through the digestive tract, such as orally. Preparation of such pharmaceutically acceptable compositions is within the skill of the art.

[0445] The formulation components are present preferably in concentrations that are acceptable to the site of administration. In certain embodiments, buffers are used to maintain the composition at physiological pH or at a slightly lower pH, typically within a pH range of from about 5 to about 8.

[0446] When parenteral administration is contemplated, the therapeutic compositions may be provided in the form of a pyrogen-free, parenterally acceptable aqueous solution comprising the desired human GIPR antigen binding protein in a pharmaceutically acceptable vehicle. A particularly suitable vehicle for parenteral injection is sterile distilled water in which the GIPR antigen binding protein is formulated as a sterile, isotonic solution, properly preserved. In certain embodiments, the preparation can involve the formulation of the desired molecule with an agent, such as injectable microspheres, bio-erodible particles, polymeric compounds (such as polylactic acid or polyglycolic acid), beads or liposomes, that may provide controlled or sustained release of the product which can be delivered via depot injection. In certain embodiments, hyaluronic acid may also be used, having the effect of promoting sustained duration in the circulation. In certain embodiments, implantable drug delivery devices may be used to introduce the desired antigen binding protein.

[0447] Certain pharmaceutical compositions are formulated for inhalation. In some embodiments, GIPR antigen binding proteins are formulated as a dry, inhalable powder. In specific embodiments, GIPR antigen binding protein inhalation solutions may also be formulated with a propellant for aerosol delivery. In certain embodiments, solutions may be nebulized. Pulmonary administration and formulation methods therefore are further described in International Patent Application No. PCT/US94/001875, which is incorporated by reference and describes pulmonary delivery of chemically modified proteins. Some formulations can be administered orally. GIPR antigen binding proteins that are administered in this fashion can be formulated with or without carriers customarily used in the compounding of solid dosage forms such as tablets and capsules. In certain embodiments, a capsule may be designed to release the active portion of the formulation at the point in the gastrointestinal tract when bioavailability is maximized and pre-systemic degradation is minimized. Additional agents can be included to facilitate absorption of the GIPR antigen binding protein. Diluents, flavorings, low melting point waxes, vegetable oils, lubricants, suspending agents, tablet disintegrating agents, and binders may also be employed.

[0448] Some pharmaceutical compositions comprise an effective quantity of one or a plurality of GIPR antigen binding proteins in a mixture with non-toxic excipients that are suitable for the manufacture of tablets. By dissolving the tablets in sterile water, or another appropriate vehicle, solutions may be prepared in unit-dose form. Suitable excipients include, but are not limited to, inert diluents, such as calcium carbonate, sodium carbonate or bicarbonate, lactose, or calcium phosphate; or binding agents, such as starch, gelatin, or acacia; or lubricating agents such as magnesium stearate, stearic acid, or tale.

[0449] Additional pharmaceutical compositions will be evident to those skilled in the art, including formulations involving GIPR binding proteins in sustained- or controlled-delivery formulations. Techniques for formulating a variety of other sustained- or controlled-delivery means, such as liposome carriers, bio-erodible microparticles or porous beads and depot injections, are also known to those skilled in the art. See, for example, International Patent Application No. PCT/US93/00829, which is incorporated by reference and describes controlled release of porous polymeric microparticles for delivery of pharmaceutical compositions. Sustained-release preparations may include semipermeable polymer matrices in the form of shaped articles, e.g., films, or microcapsules. Sustained release matrices may include polyesters, hydrogels, polylactides (as disclosed in U.S. Pat. No. 3,773,919 and European Patent Application Publication No. EP 058481, each of which is incorporated by reference), copolymers of L-glutamic acid and gamma ethyl-L-glutamate (Sidman et al., 1983, Biopolymers 2:547-556), poly (2-hydroxyethyl-inethacrylate) (Langer et al., 1981, J. Biomed. Mater. Res. 15:167-277 and Langer, 1982, Chem. Tech. 12:98-105), ethylene vinyl acetate (Langer et al., 1981, supra) or poly-D(−)-3-hydroxybutyric acid (European Patent Application Publication No. EP 133,988). Sustained release compositions may also include liposomes that can be prepared by any of several methods known in the art. See, e.g., Eppstein et al., 1985, Proc. Natl. Acad. Sci. U.S.A. 82:3688-3692; European Patent Application Publication Nos. EP 036,676; EP 088,046 and EP 143,949, incorporated by reference.

[0450] Pharmaceutical compositions used for in vivo administration are typically provided as sterile preparations. Sterilization can be accomplished by filtration through sterile filtration membranes. When the composition is lyophilized, sterilization using this method may be conducted either prior to or following lyophilization and reconstitution. Compositions for parenteral administration can be stored in lyophilized form or in a solution. Parenteral compositions generally are placed into a container having a sterile access port, for example, an intravenous solution bag or vial having a stopper pierceable by a hypodermic injection needle.

[0451] In certain formulations, an antigen binding protein has a concentration of at least 10 mg/mL, 20 mg/mL, 30 mg/mL, 40 mg/mL, 50 mg/mL, 60 mg/mL, 70 mg/mL, 80 mg/mL, 90 mg/mL, 100 mg/mL or 150 mg/mL. In one embodiment, a pharmaceutical composition comprises the antigen binding protein, a buffer and polysorbate. In other embodiments, the pharmaceutical composition comprises an antigen binding protein, a buffer, sucrose and polysorbate. An example of a pharmaceutical composition is one containing 50-100 mg/mL of antigen binding protein, 5-20 mM sodium acetate, 5-10% w/v sucrose, and 0.002-0.008% w/v polysorbate. Certain, compositions, for instance, contain 65-75 mg/mL of an antigen binding protein in 9-11 mM sodium acetate buffer, 8-10% w/v sucrose, and 0.005-0.006% w/v polysorbate. The pH of certain such formulations is in the range of 4.5-6. Other formulations have a pH of 5.0-5.5 (e.g., pH of 5.0, 5.2 or 5.4).

[0452] Once the pharmaceutical composition has been formulated, it may be stored in sterile vials as a solution, suspension, gel, emulsion, solid, crystal, or as a dehydrated or lyophilized powder. Such formulations may be stored either in a ready-to-use form or in a form (e.g., lyophilized) that is reconstituted prior to administration. Kits for producing a single-dose administration unit are also provided. Certain kits contain a first container having a dried protein and a second container having an aqueous formulation. In certain embodiments, kits containing single and multi-chambered pre-filled syringes (e.g., liquid syringes and lyosyringes) are provided. The therapeutically effective amount of a GIPR antigen binding protein-containing pharmaceutical composition to be employed will depend, for example, upon the therapeutic context and objectives. One skilled in the art will appreciate that the appropriate dosage levels for treatment will vary depending, in part, upon the molecule delivered, the indication for which the GIPR antigen binding protein is being used, the route of administration, and the size (body weight, body surface or organ size) and/or condition (the age and general health) of the patient. In certain embodiments, the clinician may titer the dosage and modify the route of administration to obtain the optimal therapeutic effect.

[0453] Dosing frequency will depend upon the pharmacokinetic parameters of the particular GIPR antigen binding protein in the formulation used. Typically, a clinician administers the composition until a dosage is reached that achieves the desired effect. The composition may therefore be administered as a single dose, or as two or more doses (which may or may not contain the same amount of the desired molecule) over time, or as a continuous infusion via an implantation device or catheter. Appropriate dosages may be ascertained through use of appropriate dose-response data. In certain embodiments, the antigen binding proteins can be administered to patients throughout an extended time period. In certain embodiments, the antigen binding protein is dosed every two weeks, every month, every two months, every three months, every four months, every five months, or every six months.

[0454] The route of administration of the pharmaceutical composition is in accord with known methods, e.g., orally, through injection by intravenous, intraperitoneal, intracerebral (intra-parenchymal), intracerebroventricular, intramuscular, intra-ocular, intraarterial, intraportal, or intralesional routes; by sustained release systems or by implantation devices. In certain embodiments, the compositions may be administered by bolus injection or continuously by infusion, or by implantation device.

[0455] The composition also may be administered locally via implantation of a membrane, sponge or another appropriate material onto which the desired molecule has been absorbed or encapsulated. In certain embodiments, where an implantation device is used, the device may be implanted into any suitable tissue or organ, and delivery of the desired molecule may be via diffusion, timed-release bolus, or continuous administration.

[0456] It also may be desirable to use GIPR antigen binding protein pharmaceutical compositions according to the disclosed ex vivo. In such instances, cells, tissues or organs that have been removed from the patient are exposed to GIPR antigen binding protein pharmaceutical compositions after which the cells, tissues and/or organs are subsequently implanted back into the patient.

[0457] A physician will be able to select an appropriate treatment indication and target lipid levels depending on the individual profile of a particular patient. One well-accepted standard for guiding treatment of hyperlipidemia is the Third Report of the National Cholesterol Education Program (NCEP) Expert Panel on Detection, Evaluation, and Treatment of the High Blood Cholesterol in Adults (Adult Treatment Panel III) Final Report, National Institutes of Health, NIH Publication No. 02-5215 (2002), the printed publication of which is hereby incorporated by reference in its entirety.

[0458] The efficacy of a particular dose can be assessed by reference to biomarkers or improvement in certain physiological parameters. Examples of suitable biomarkers include, the ratio of free cholesterol to plasma lipid, free cholesterol to membrane protein, phospatidylcholine to sphingomyelin, or HDL-C levels.

[0459] Also provided herein are compositions comprising a GIPR antigen binding protein and one or more additional therapeutic agents, as well as methods in which such agents are administered concurrently or sequentially with a GIPR antigen binding protein for use in the preventive and therapeutic methods disclosed herein. The one or more additional agents can be co-formulated with a GIPR antigen binding protein or can be co-administered with a GIPR antigen binding protein. In general, the therapeutic methods, compositions and compounds may also be employed in combination with other therapeutics in the treatment of various disease states, with the additional agents being administered concurrently.

[0460] In one aspect the present invention is directed to a method of treating a subject with a metabolic disorder, the method comprising administering to the subject a composition comprising a GIPR antagonist that inhibits GIPR function and a GLP-1 receptor agonist, wherein the GLP-1 receptor agonist is conjugated to the GIPR antagonist. In one embodiment the GIPR antagonist inhibits GIP binding to GIPR.

[0461] In one aspect the present invention is directed to a method of treating a subject with a metabolic disorder, the method comprising administering to the subject a composition comprising an antibody or functional fragment thereof that specifically binds to human GIPR, wherein the antibody or functional fragment thereof comprises a cysteine or non-canonical amino acid amino acid substitution at one or more conjugation site(s); and a GLP-1 receptor agonist, wherein the GLP-1 receptor agonist is conjugated to the antibody or functional fragment thereof through the side-chain of the cysteine residue or non-canonical amino acid residue substituted at the one or more conjugation site(s).

[0462] In one aspect the present invention is directed to a method of treating a subject with a metabolic disorder, the method comprising administering to the subject a therapeutically effective amount of a GLP-1 receptor agonist and a therapeutically effective amount of a GIPR antagonist that specifically binds to a protein having an amino acid sequence having at least 90% amino acid sequence identity to an amino acid sequence of a GIPR, wherein the GIPR antagonist is conjugated to the GLP-1 receptor agonist. Such conjugated molecules can be referred to as “anti-GIPR/GLP-1R bispecific conjugate”, “anti-GIPR/GLP-1R peptide conjugate”, “anti-GIPR/GLP-1R conjugate”, or even “bispecific conjugate”.

[0463] In one aspect the present invention is directed to a method of promoting GIPR and GLP-1R internalization into the cell upon which they are co-expressed by administering a GIPR antagonist conjugated to a GLP-1 receptor agonist to the cell. In one embodiment, the GIPR and GLP-1R are co-localized while being internalized.

[0464] In one aspect the present invention is directed to a method of stimulating calcium flux in a cell by administering a GIPR antagonist conjugated to a GLP-1 receptor agonist to the cell.

[0465] In one aspect the present invention is directed to a method of promoting beta-arrestin recruitment in a cell by administering a GIPR antagonist conjugated to a GLP-1 receptor agonist to the cell.

[0466] In one aspect the present invention is directed to a method of stimulating insulin secretion from a cell by administering a GIPR antagonist conjugated to a GLP-1 receptor agonist to the cell. In one embodiment the cell is a human pancreatic microislet.

[0467] A “GLP-1 receptor agonist” refers to compounds having GLP-1 receptor activity. Such exemplary compounds include exendins, exendin analogs, exendin agonists, GLP-1(7-37), GLP-1(7-37) analogs, GLP-1(7-37) agonists, and the like. The GLP-1 receptor agonist compounds may optionally be amidated. The terms “GLP-1 receptor agonist” and “GLP-1 receptor agonist compound” have the same meaning.

[0468] The term “exendin” includes naturally occurring (or synthetic versions of naturally occurring) exendin peptides that are found in the salivary secretions of the Gila monster. Exendins of particular interest include exendin-3 and exendin-4. The exendins, exendin analogs, and exendin agonists for use in the methods described herein may optionally be amidated, and may also be in an acid form, pharmaceutically acceptable salt form, or any other physiologically active form of the molecule.

[0469] In one embodiment, the GLP-1 receptor agonist is GLP-1(7-37) or a GLP-1(7-37) analog.

[0470] In one embodiment, the GLP-1 receptor agonist is selected from the group consisting of exenatide, liraglutide, lixisenatide, albiglutide, dulaglutide, semaglutide, and taspoglutide.

[0471] In one aspect the present invention is directed to a method of treatment comprising administering to a subject a therapeutically effective amount of at least one GLP-1 receptor agonist in combination with administration of at least one GIPR antagonist, wherein the GIPR antagonist is conjugated to the GLP-1 receptor agonist, which upon administration to a subject with symptoms of a metabolic disorder provides sustained beneficial effects.

[0472] In one embodiment, administration of at least one GLP-1 receptor agonist in combination with administration of at least one GIPR antagonist provides sustained beneficial effects of at least one symptom of a metabolic disorder.

[0473] In one embodiment, the therapeutically effective amounts of the GLP-1 receptor agonist and the GIPR antagonist are combined prior to administration to the subject.

[0474] In one embodiment, the therapeutically effective amounts of the GLP-1 receptor agonist and the GIPR antagonist are administered to the subject sequentially.

[0475] In one embodiment, the therapeutically effective amounts of a GLP-1 receptor agonist and a GIPR antagonist are synergistically effective amounts.

[0476] Exendin-4 (HGEGTFTSDLSKQMEEEAVRLFIEWLKNGGPSSGAPPPS-NH₂ (SEQ ID NO: 3163)) is a peptide found in the saliva of the Gila monster, Heloderma suspectum; and exendin-3 (HSDGTFTSDLSKQMEEEAVRLFIEWLKNGGPSSGAPPPS-NH₂(SEQ ID NO: 3164)) is a peptide found in the saliva of the beaded lizard, Heloderma horridum. Exendins have some amino acid sequence similarity to some members of the glucagon-like peptide (GLP) family. For example, exendin-4 has about 53% sequence identity with glucagon-like peptide-1(GLP-1)(7-37) (HAEGTFTSDVSSYLEGQAAKEFIAWLVKGRG (SEQ ID NO: 3184)). However, exendin-4 is transcribed from a distinct gene, not the Gila monster homolog of the mammalian proglucagon gene from which GLP-1 is expressed. Additionally, exendin-4 is not an analog of GLP-1(7-37) because the structure of synthetic exendin-4 peptide was not created by sequential modification of the structure of GLP-1. Nielsen et al., Current Opinion in Investigational Drugs, 4(4):401-405 (2003).

[0477] Synthetic exendin-4, also known as exenatide, is commercially available as BYETTA® (Amylin Pharmaceuticals, Inc. and Eli Lilly and Company). A once weekly formulation of exenatide is described in WO 2005/102293, the disclosure of which is incorporated by reference herein.

[0478] “Exendin analog” refers to peptides which elicit a biological activity of an exendin reference peptide, preferably having a potency equal to or better than the exendin reference peptide (e.g., exendin-4), or within five orders of magnitude (plus or minus) of potency compared to the exendin reference peptide, when evaluated by art-known measures such as receptor binding and/or competition studies as described, e.g., by Hargrove et al., Regulatory Peptides, 141:113-119 (2007), the disclosure of which is incorporated by reference herein. Preferably, the exendin analogs will bind in such assays with an affinity of less than 1 μM, and more preferably with an affinity of less than 3 nM, less than 1 nM, or less than 0.1 nM. The term “exendin analog” may also be referred to as “exendin agonist”. In a preferred embodiment, the exendin analog is an exendin-4 analog.

[0479] Exendin analogs also include the peptides described herein which have been chemically derivatized or altered, for example, peptides with non-natural amino acid residues (e.g., taurine, (3-amino acid residues, γ-amino acid residues, and D-amino acid residues), C-terminal functional group modifications, such as amides, esters, and C-terminal ketone modifications and N-terminal functional group modifications, such as acylated amines, Schiff bases, or cyclization, as found, for example, in the amino acid pyroglutamic acid. Exendin analogs may also contain other chemical moieties, such as peptide mimetics.

[0480] Exemplary exendins and exendin analogs exendin-4 (SEQ ID NO: 3163); exendin-3 (SEQ ID NO: 3164); Leu¹⁴-exendin-4 (SEQ ID NO: 3165); Leu¹⁴,Phe²⁵-exendin-4 (SEQ ID NO: 3166); Leu¹⁴,Ala¹⁹,Phe²⁵-exendin-4 (SEQ ID NO: 3167); exendin-4(1-30) (SEQ ID NO: 3168); Leu¹⁴-exendin-4(1-30) (SEQ ID NO: 3169); Leu¹⁴,Phe²⁵-exendin-4(1-30) (SEQ ID NO: 3170); Leu³⁴,Ala¹⁹,Phe²⁵-exendin-4(1-30) (SEQ ID NO: 3171); exendin-4(1-28) (SEQ ID NO: 3172); Leu⁴-exendin-4(1-28) (SEQ ID NO: 3173); Leu¹⁴,Phe²⁵-exendin-4(1-28) (SEQ ID NO: 3174); Leu¹⁴,Ala¹⁹,Phe²⁵-exendin-4 (1-28) (SEQ ID NO: 3175); Leu¹⁴,Lys^{17,20},Ala¹⁹,Glu²¹,Phe²⁵,Gln²⁸-exendin-4 (SEQ ID NO: 3176); Leu¹⁴,Lys^{17,20},Ala¹⁹,Glu²¹,Gln²⁸-exendin-4 (SEQ ID NO: 3177); octylGly¹⁴,Gln²⁸-exendin-4 (SEQ ID NO: 3178); Leu¹⁴,Gln²⁸,octylGly³⁴-exendin-4 (SEQ ID NO: 3179); Phe⁴,Leu¹⁴,Gln²⁸,Lys³³,Glu³⁴,Ile^{35,36},Ser³⁷-exendin-4(1-37) (SEQ ID NO: 3180); Phe⁴,Leu¹⁴,Lys^{17,20},Ala¹⁹,Glu²¹,Gln²⁸-exendin-4 (SEQ ID NO: 3181); Val¹¹,Ile¹³,Leu¹⁴,Ala¹⁶,Lys²¹,Phe²⁵-exendin-4 (SEQ ID NO: 3182); exendin-4-Lys⁴⁰(SEQ ID NO: 3183); lixisenatide (Sanofi-Aventis/Zealand Pharma); CJC-1134 (ConjuChem, Inc.); [N^{e}-(7-carboxyheptadecanoic acid)Lys²⁰]exendin-4-NH₂ (SEQ ID NO: 3208); [N^{e}-(17-carboxyhepta-decanoyl)Lys³²]exendin-4-NH₂ (SEQ ID NO: 3209); [desamino-His¹,N^{e}-(17-carboxyheptadecanoyl)Lys²⁰]exendin-4-NH₂ (SEQ ID NO: 3210); [Arg^{12,27},NLe¹⁴,N^{e}-(17-carboxy-heptadecanoyl)Lys³²]exendin-4-NH₂(SEQ ID NO: 3211); [N^{e}-(19-carboxy-nonadecanoylamino)Lys²⁰]-exendin-4-NH₂ (SEQ ID NO: 3212); [N^{e}-(15-carboxypentadecanoylamino)Lys²⁰]-exendin-4-NH₂(SEQ ID NO: 3213); [N^{e}-(13-carboxytridecanoylamino)Lys²⁰]exendin-4-NH₂ (SEQ ID NO: 3214); [N^{e}-(11-carboxy-undecanoyl-amino)Lys²⁰]exendin-4-NH₂ (SEQ ID NO: 3215); exendin-4-Ly s⁴⁰(e-MPA)-NH₂ (SEQ ID NO: 3216); exendin-4-Lys⁴⁰(e-AEEA-AEEA-MPA)-NH₂ (SEQ ID NO: 3217); exendin-4-Lys⁴⁰(e-AEEA-MPA)-NH₂ (SEQ ID NO: 3218); exendin-4-Lys⁴⁰(e-MPA)-albumin (SEQ ID NO: 3219); exendin-4-Lys⁴° (e-AEEA-AEEA-MPA)-albumin (SEQ ID NO: 3220); exendin-4-Lys⁴⁰(e-AEEA-MPA)-albumin (SEQ ID NO: 3221); and the like. AEEA refers to [2-(2-amino)ethoxy)]acetic acid. EDA refers to ethylenediamine. MPA refers to maleimidopropionic acid. The exendins and exendin analogs may optionally be amidated.

[0481] In one embodiment, the GLP-1 receptor agonist compound is an exendin-4 analog that has at least 80% sequence identity to exendin-4 (SEQ ID NO: 3163); at least 85% sequence identity to exendin-4 (SEQ ID NO: 3163); at least 90% sequence identity to exendin-4 (SEQ ID NO: 3163); or at least 95% sequence identity to exendin-4 (SEQ ID NO: 3163).

[0482] Other exendins and exendin analogs useful in the methods described herein include those described in WO 98/05351; WO 99/07404; WO 99/25727; WO 99/25728; WO 99/40788; WO 00/41546; WO 00/41548; WO 00/73331; WO 01/51078; WO 03/099314; U.S. Pat. Nos. 6,956,026; 6,506,724; 6,703,359; 6,858,576; 6,872,700; 6,902,744; 7,157,555; 7,223,725; 7,220,721; US Publication No. 2003/0036504; and US Publication No. 2006/0094652, the disclosures of which are incorporated by reference herein in their entirety.

[0483] “GLP-1(7-37) analogs” refers to peptides which elicit a biological activity similar to that of GLP-1(7-37), when evaluated by art-known measures such as receptor binding assays or in vivo blood glucose assays as described, e.g., by Hargrove et al., Regulatory Peptides, 141:113-119 (2007), the disclosure of which is incorporated by reference herein. In one embodiment, the term “GLP-1(7-37) analog” refers to a peptide that has an amino acid sequence with 1, 2, 3, 4, 5, 6, 7 or 8 amino acid substitutions, insertions, deletions, or a combination of two or more thereof, when compared to the amino acid sequence of GLP-1(7-37). In one embodiment, the GLP-1(7-37) analog is GLP-1(7-36)-NH₂. GLP-1(7-37) analogs include the amidated forms, the acid form, the pharmaceutically acceptable salt form, and any other physiologically active form of the molecule. In some embodiments a simple nomenclature is used to describe the GLP-1 receptor agonist, e.g., [Aib8]GLP-1(7-37) designates an analogue of GLP-1(7-37) wherein the naturally occurring Ala in position 8 has been substituted with Aib.

[0484] Exemplary GLP-1(7-37) and GLP-1(7-37) analogs include GLP-1(7-37) (SEQ ID NO: 3184); GLP-1(7-36)-NH₂ (SEQ ID NO: 3185); liraglutide (VICTOZA® from Novo Nordisk); albiglutide (SYNCRIA®) from GlaxoSmithKline); taspoglutide (Hoffman La-Roche); dulaglutide (also known LY2189265; Eli Lilly and Company); LY2428757 (Eli Lilly and Company); desamino-His⁷,Arg²⁶,Lys³⁴(N-(γ-Glu(N-α-hexadecanoyl)))-GLP-1(7-37) (core peptide disclosed as SEQ ID NO: 3222); desamino-His⁷,Arg²⁶,Lys¹⁴(N-octanoyl)-GLP-1(7-37) (SEQ ID NO: 3223); Arg^{26,34},Lys³⁸(N^{e}-(o)carboxy pentadecanoyl))-GLP-1(7-38) (SEQ ID NO: 3224); Arg²³⁴,Ly s⁶(N^{e}-(7-Glu(N-α-hexadecanoyl)))-GLP-1(7-36) (core peptide disclosed as SEQ ID NO: 3225); Aib^{8,35},Arg^{26,34},Phe³¹-GLP-1(7-36)) (SEQ ID NO: 3186); HXaa₈EGTFTSDVSSYLEXaa₂₂Xaa₂₃AAKEFIXaa₃₀WLXaa₃₃Xaa₃₄G Xaa₃₆Xaa₃₇; wherein Xaa₃₄ is A, V, or G; Xaa₂₂ is G, K, or E; Xaa₂₃ is Q or K; Xaa₃₀ is A or E; Xaa₃₃ is V or K; Xaa₃₄ is K, N, or R; Xaa₃₆ is R or G; and Xaa₃₇ is G, H, P. or absent (SEQ ID NO: 3187); Arg³⁴-GLP-1(7-37) (SEQ ID NO: 3188); Glu³⁰-GLP-1(7-37) (SEQ ID NO: 3189); Lys²²-GLP-1(7-37) (SEQ ID NO: 3190); Gly^{8,36},Glu²²-GLP-1(7-37) (SEQ ID NO: 3191); Val⁸,Glu²²,Gly³⁶-GLP-1(7-37) (SEQ ID NO: 3192); Gly^{8,36},Glu²²,Lys³³,Asn³⁴-GLP-1(7-37) (SEQ ID NO: 3193); Val⁸,Glu²²,Lys³³,Asn³⁴,Gly³⁶-GLP-1(7-37) (SEQ ID NO: 3194); Gly^{8,36}Glu²²,Pro³⁷-GLP-1(7-37) (SEQ ID NO: 3195): Val⁸,Glu²²,Gly³⁶Pro³⁷-GLP-1(7-37) (SEQ ID NO: 3196); Gly^{8,36},Glu²²,Lys³³,Asn³⁴,Pro³⁷-GLP-1(7-37) (SEQ ID NO: 3197); Val⁸,Glu²²,Lys³³,Asn³⁴,Gly³⁶,Pro³⁷-GLP-1(7-37) (SEQ ID NO: 3198); Gly^{8,36},Glu²²-GLP-1(7-36) (SEQ ID NO: 3199); Val⁸,Glu²²,Gly³⁶-GLP-1(7-36) (SEQ ID NO: 3200); Val⁸,Glu²²,Asn³⁴,Gly³⁶-GLP-1(7-36) (SEQ ID NO: 3201); Gly^{8,36},Glu²²,Asn³⁴-GLP-1(7-36) (SEQ ID NO: 3202). Each of the GLP-1(7-37) and GLP-1(7-37) analogs may optionally be amidated.

[0485] The GLP-1 receptor agonists of the inventive composition of matter can also be chemically derivatized at one or more amino acid residues by known organic chemistry techniques. “Chemical derivative” or “chemically derivatized” refers to a subject peptide having one or more residues chemically derivatized by reaction of a functional side group. Such derivatized molecules include, for example, those molecules in which free amino groups have been derivatized to form amine hydrochlorides, p-toluene sulfonyl groups, carbobenzoxy groups, t-butyloxycarbonyl groups, chloroacetyl groups or formyl groups. Free carboxyl groups may be derivatized to form salts, methyl and ethyl esters or other types of esters or hydrazides. Free hydroxyl groups may be derivatized to form O-acyl or O-alkyl derivatives. The imidazole nitrogen of histidine may be derivatized to form N-im-benzylhistidine. Also included as chemical derivatives are those peptides which contain one or more naturally occurring amino acid derivatives of the twenty canonical amino acids, whether in L- or D- form. For example, 4-hydroxyproline may be substituted for proline; 5-hydroxylysine maybe substituted for lysine; 3-methylhistidine may be substituted for histidine; homoserine may be substituted for serine; and ornithine may be substituted for lysine.

[0486] Useful derivatizations include, in some embodiments, those in which the amino terminal of the peptide is chemically blocked so that conjugation with the vehicle will be prevented from taking place at an N-terminal free amino group. There may also be other beneficial effects of such a modification, for example a reduction in the toxin peptide analog's susceptibility to enzymatic proteolysis. The N-terminus can be acylated or modified to a substituted amine, or derivatized with another functional group, such as an aromatic moiety (e.g., an indole acid, benzyl (Bzl or Bn), dibenzyl (DiBzl or Bn₂), or benzyloxycarbonyl (Cbz or Z)), N,N-dimethylglycine or creatine. For example, in some embodiments, an acyl moiety, such as, but not limited to, a formyl, acetyl (Ac), propanoyl, butanyl, heptanyl, hexanoyl, octanoyl, or nonanoyl, can be covalently linked to the N-terminal end of the peptide, which can prevent undesired side reactions during conjugation of the vehicle to the peptide. Other exemplary N-terminal derivative groups include —NRR¹ (other than —NH₂), —NRC(O)R¹, —NRC(O)OR¹, —NRS(O)₂R¹, —NHC(O)NHR¹, succinimide, or benzyloxycarbonyl-NH-(Cbz-NH-), wherein R and R¹ are each independently hydrogen or lower alkyl and wherein the phenyl ring may be substituted with I to 3 substituents selected from C₁-C₄ alkyl, C₁-C₄ alkoxy, chloro, and bromo.

[0487] In some embodiments, one or more peptidyl [—C(O)NR-]linkages (bonds) between amino acid residues can be replaced by a non-peptidyl linkage. Exemplary non-peptidyl linkages are —CH₂-carbamate [—CH₂—OC(O)NR—], phosphonate, —CH₂-sulfonamide [—CH₂—S(O)₂NR—], urea [—NHC(O)NH—], —CH₂-secondary amine, and alkylated peptide [—C(O)NR⁶— wherein R6 is lower alkyl].

[0488] In some embodiments, one or more individual amino acid residues can be derivatized. Various derivatizing agents are known to react specifically with selected sidechains or terminal residues, as described in detail below by way of example.

[0489] Lysinyl residues and amino terminal residues may be reacted with succinic or other carboxylic acid anhydrides, which reverse the charge of the lysinyl residues. Other suitable reagents for derivatizing alpha-amino-containing residues include imidoesters such as methyl picolinimidate; pyridoxal phosphate; pyridoxal; chloroborohydride; trinitrobenzenesulfonic acid; O-methylisourea; 2,4 pentanedione; and transaminase-catalyzed reaction with glyoxylate.

[0490] Arginyl residues may be modified by reaction with any one or combination of several conventional reagents, including phenylglyoxal, 2,3-butanedione, 1,2-cyclohexanedione, and ninhydrin. Derivatization of arginyl residues requires that the reaction be performed in alkaline conditions because of the high pKa of the guanidine functional group. Furthermore, these reagents may react with the groups of lysine as well as the arginine epsilon-amino group.

[0491] Specific modification of tyrosyl residues has been studied extensively, with particular interest in introducing spectral labels into tyrosyl residues by reaction with aromatic diazonium compounds or tetranitromethane. Most commonly, N-acetylimidizole and tetranitromethane are used to form 0-acetyl tyrosyl species and 3-nitro derivatives, respectively.

[0492] Carboxyl sidechain groups (aspartyl or glutamyl) may be selectively modified by reaction with carbodiimides (R′—N═C═N—R′) such as 1-cyclohexyl-3-(2-morpholinyl-(4-ethyl) carbodiimide or 1-ethyl-3-(4-azonia-4,4-dimethylpentyl) carbodiimide. Furthermore, aspartyl and glutamyl residues may be converted to asparaginyl and glutaminyl residues by reaction with ammonium ions.

[0493] Glutaminyl and asparaginyl residues may be deamidated to the corresponding glutamyl and aspartyl residues. Alternatively, these residues are deamidated under mildly acidic conditions. Either form of these residues falls within the scope of this invention.

[0494] Cysteinyl residues can be replaced by amino acid residues or other moieties either to eliminate disulfide bonding or, conversely, to stabilize cross-linking. (See, e.g., Bhatnagar et al., J. Med. Chem., 39:3814-3819 (1996)).

[0495] Other possible modifications include hydroxylation of proline and lysine, phosphorylation of hydroxyl groups of seryl or threonyl residues, oxidation of the sulfur atom in Cys, methylation of the alpha-amino groups of lysine, arginine, and histidine side chains. Creighton, Proteins: Structure and Molecule Properties (W. H. Freeman & Co., San Francisco), 79-86 (1983).

[0496] The above examples of derivatizations are not intended to be an exhaustive treatment, but merely illustrative

[0497] In one embodiment, the GLP-1(7-37) or GLP-1(7-37) analogs are covalently linked (directly or by a linking group) to an Fc portion of an immunoglobulin (e.g., IgG, IgE, IgG, and the like). For example, any one of SEQ ID NOs:25-40 may be covalently linked to the Fc portion of an immunoglobulin comprising the sequence of: AESKYGPPCPPCPAPXaa₁₆Xaa₁₇Xaa₁₈GGPSVFLFPPKPKDTLMISRTPEVTCVVVDVSQEDPEV QFNWYVDGVEVHNAKTKPREEQFXaa₈₀STYRVVSVLTVLHQDWLNGKEYKCKVSNKGLPSS IEKTISKAKGQPREPQVYTLPPSQEEMTKNQVSLTCLVKGFYPSDIAVEWESNGQPENNYKTT PPVLDSDGSFFLYSRLTVDKSRWQEGNVFSCSVMHEALHNHYTQKSLSLSLGXaa₂₃₀; wherein Xaa₆ is P or E; Xaa₁₇ is F, V or A; Xaa₁₈ is L. E or A; Xaa₈₀ is N or A; and Xaa₂₃₀ is K or absent (SEQ ID NO: 3203). The linking group may be any chemical moiety (e.g., amino acids and/or chemical groups). In one embodiment, the linking group is (-GGGGS-)ₓ (SEQ ID NO: 3204) where x is 1, 2, 3, 4, 5 or 6; preferably 2, 3 or 4; more preferably 3. In one embodiment, the GLP-1(7-37) analog covalently linked to the Fc portion of an immunoglobulin comprises the amino acid sequence:

(SEQ ID NO: 3205)
HGEGTFTSDVSSYLEEQAAKEFIAWLVKGGGGGGGSGGGGSGGGGSAESK
YGPPCPPCPAPEAAGGPSVFLFPPKPKDTLMISRTPEVTCVVVDVSQEDP
EVQFNWYVDGVEVHNAKTKPREEQFNSTYRVVSVLTVLHQDWLNGKEYKC
KVSNKGLPSSIEKTISKAKGQPREPQVYTLPPSQEEMTKNQVSLTCLVKG
FYPSDIAVEWESNGQPENNYKTTPPVLDSDGSFFLYSRLTVDKSRWQEGN
VFSCSVMHEALHNHYTQKSLSLSLG.

[0498] In another embodiment, the GLP-1(7-37) or GLP-1(7-37) analog may be covalently linked (directly or through a linking group) to one or two polyethylene glycol molecules. For example, a GLP-1(7-37) analog may comprise the amino acid sequence: HXaa₈EGTFTSDVS SYLEXaa₂₂QAAKEFTAWLXaa₃₃KGGPSSGAPPPC₄₅C₄₆-Z, wherein Xaa₈ is: D-Ala, G, V, L, I, S or T; Xaa₂₂ is G, E, D or K; Xaa₃₃ is: V or I; and Z is OH or NH₂, (SEQ ID NO: 3206), and, optionally, wherein (i) one polyethylene glycol moiety is covalently attached to C₄₅ (ii) one polyethylene glycol moiety is covalently attached to C₄₆, or (iii) one polyethylene glycol moiety is attached to C₄₅ and one polyethylene glycol moiety is attached to C₄₅. In one embodiment, the GLP-1(7-37) analog is HVEGTFTSDVSSYLEEQAAKEFI AWLIKGGPSSGAPPPC₄₅C₄₆-NH₂(SEQ ID NO: 3207) and, optionally, wherein (i) one polyethylene glycol moiety is covalently attached to C₄, (ii) one polyethylene glycol moiety is covalently attached to C₄₆, or (iii) one polyethylene glycol moiety is attached to C₄₅ and one polyethylene glycol moiety is attached to C₄₆.

[0499] GLP-1 receptor agonist amino acid residues that can provide a primary amine moiety for conjugation include residues of lysine, homolysine, ornithine, α, β-diaminopropionic acid (Dap), α, β-diaminopropionoic acid (Dpr), and α, γ-diaminobutyric acid (Dab), aminobutyric acid (Abu), and α-amino-isobutyric acid (Aib). The polypeptide N-terminus also provides a useful □-amino group for conjugation as does an amidated polypeptide C-terminus. In certain embodiments, the GLP-1(7-37) or GLP-1(7-37) analog is conjugated to the antibody or fragment thereof at a residue that corresponds to K26 (position 20 of SEQ ID NO: 3184), K34 (position 28 of SEQ ID NO: 3184), K36 (position 30 of SEQ ID NO: 3184; e.g., via a R36K mutation), K37 (position 31 of SEQ ID NO: 3184; e.g., via a 5 G37K mutation), K39 (e.g., via addition of two amino acids to the GLP-1(7-37) or GLP-1(7-37) analog with lysine at position 39) or a C-terminal amine group of said analog. Amino acid residues that can provide a secondary amine moiety include ε-N-alkyl lysine, α-N-alkyl lysine, δ-N-alkyl ornithine, α-N-alkyl ornithine, or an N-terminal proline, where the alkyl is C₁ to C₆

[0500] A “linker moiety” as used herein refers to a biologically acceptable peptidyl or non-peptidyl organic group that is covalently bound to an amino acid residue of a toxin peptide analog or other polypeptide chain (e.g., an immunoglobulin HC or LC or immunoglobulin Fc domain) contained in the inventive composition, which linker moiety covalently joins or conjugates the toxin peptide analog or other polypeptide chain to another peptide or polypeptide chain in the composition, or to a half-life extending moiety. In some embodiments of the composition, a half-life extending moiety, as described herein, is conjugated, i.e., covalently bound directly to an amino acid residue of the toxin peptide analog itself, or optionally, to a peptidyl or non-peptidyl linker moiety (including but not limited to aromatic or aryl linkers) that is covalently bound to an amino acid residue of the toxin peptide analog. The presence of any linker moiety is optional. When present, its chemical structure is not critical, since it serves primarily as a spacer to position, join, connect, or optimize presentation or position of one functional moiety in relation to one or more other functional moieties of a molecule of the inventive composition. The presence of a linker moiety can be useful in optimizing pharmacological activity of some embodiments of the inventive composition. The linker, if present, can be made up of amino acids linked together by peptide bonds. The linker moiety, if present, can be independently the same or different from any other linker, or linkers, that may be present in the inventive composition. In some embodiments the linker can be a multivalent linker that facilitates multivalent display of toxin peptide analogs of the present invention; multivalent display of such biologically active compounds can increase binding affinity and/or potency through avidity. The in vivo properties of a therapeutic can be altered (i.e., specific targeting, half-life extension, distribution profile, etc.) through conjugation to a polymer or protein.

### Peptidyl Linkers.

[0501] As stated above, the linker moiety, if present (whether within the primary amino acid sequence of the toxin peptide analog, or as a linker for attaching a half-life extending moiety to the toxin peptide analog), can be “peptidyl” in nature (i.e., made up of amino acids linked together by peptide bonds) and made up in length, preferably, of from 1 up to about 40 amino acid residues, more preferably, of from 1 up to about 20 amino acid residues, and most preferably of from 1 to about 10 amino acid residues. Preferably, but not necessarily, the amino acid residues in the linker are from among the twenty canonical amino acids, more preferably, cysteine, glycine, alanine, proline, asparagine, glutamine, and/or serine. Even more preferably, a peptidyl linker is made up of a majority of amino acids that are sterically unhindered, such as glycine, serine, and alanine linked by a peptide bond. It is also desirable that, if present, a peptidyl linker be selected that avoids rapid proteolytic turnover in circulation in vivo. Some of these amino acids may be glycosylated, as is well understood by those in the art. For example, a useful linker sequence constituting a sialylation site is X₁X₂NX₄X₅G (SEQ ID NO: 3250), wherein X₁, X₂, X₄ and X₅ are each independently any amino acid residue.

[0502] In other embodiments, the 1 to 40 amino acids of the peptidyl linker moiety are selected from glycine, alanine, proline, asparagine, glutamine, and lysine. Preferably, a linker is made up of a majority of amino acids that are sterically unhindered, such as glycine and alanine. Thus, preferred linkers include polyglycines, polyserines, and polyalanines, or combinations of any of these. Some exemplary peptidyl linkers are poly(Gly)₁₋₈, particularly (Gly)₃-, (Gly)₄ (SEQ ID NO: 3161:), (Gly)₅ (SEQ ID NO:3251) and (Gly)₇ (SEQ ID NO:3252), as well as, GlySer and poly(Gly)₄Ser (SEQ ID NO: 3204), such as “L15” (GGGGSGGGGSGGGGS; SEQ ID NO:3253), poly(Gly-Ala)₂₋₄ and poly(Ala)₁₋₈. Other specific examples of peptidyl linkers include (Gly)₅Lys (SEQ ID NO:3254), and (Gly)₅LysArg (SEQ ID NO:3255). Other examples of useful peptidyl linkers are: Other examples of useful peptidyl linkers are:

(SEQ ID NO: 3256)
(Gly)₃Lys(Gly)₄;
(SEQ ID NO: 3257)
(Gly)₃AsnGlySer(Gly)₂;
(SEQ ID NO: 3258)
(Gly)₃Cys(Gly)₄;
and
SEQ ID NO: 3259)
GlyProAsnGlyGly.

[0503] To explain the above nomenclature, for example, (Gly)₃Lys(Gly)₄ means Gly-Gly-Gly-Lys-Gly-Gly-Gly-Gly (SEQ ID NO:3260). Other combinations of Gly and Ala are also useful.

[0504] Other preferred linkers are those identified herein as “L5” (GGGGS(SEQ ID NO: 3261); or “G₄S”; SEQ ID NO:3261), “L10” (GGGGSGGGGS; SEQ ID NO:3262); “L20” (GGGGSGGGGSGGGGSGGGGS; SEQ ID NO:3263); “L25” (GGGGSGGGGSGGGGSGGGGSGGGGS; SEQ ID NO:3264) and any linkers used in the working examples hereinafter.

[0505] In some embodiments of the compositions of this invention, which comprise a peptide linker moiety, acidic residues, for example, glutamate or aspartate residues, are placed in the amino acid sequence of the linker moiety. Examples include the following peptide linker sequences:

(SEQ ID NO: 3265)
GGEGGG;
(SEQ ID NO: 3266)
GGEEEGGG;
(SEQ ID NO: 3267)
GEEEG;
(SEQ ID NO: 3268)
GEEE;
(SEQ ID NO: 3269)
GGDGGG;
(SEQ ID NO: 3270)
GGDDDGG;
(SEQ ID NO: 3271)
GDDDG;
(SEQ ID NO: 3272)
GDDD;
(SEQ ID NO: 3273)
GGGGSDDSDEGSDGEDGGGGS;
(SEQ ID NO: 3274)
WEWEW;
(SEQ ID NO: 3275)
FEFEF;
(SEQ ID NO: 3276)
EEEWWW;
(SEQ ID NO: 3277)
EEEFFF;
(SEQ ID NO: 3278)
WWEEEWW;
or
(SEQ ID NO: 3279)
FFEEEFF.

[0506] In other embodiments, the linker constitutes a phosphorylation site, e.g., X₁X₂YX₄X₅G (SEQ ID NO:3280), wherein X₁, X₂, X₄, and X₅ are each independently any amino acid residue; X₁X₂SX₄X₅G (SEQ ID NO:3281), wherein X₁, X₂,X₄ and X₅ are each independently any amino acid residue; or X₁X₂TX₄X₅G (SEQ ID NO:3282), wherein X₁, X₂, X₄ and X₅ are each independently any amino acid residue.

[0507] The linkers shown here are exemplary; peptidyl linkers within the scope of this invention may be much longer and may include other residues. A peptidyl linker can contain, e.g., a cysteine, another thiol, or nucleophile for conjugation with a half-life extending moiety. In another embodiment, the linker contains a cysteine or homocysteine residue, or other 2-amino-ethanethiol or 3-amino-propanethiol moiety for conjugation to maleimide, iodoacetaamide or thioester, functionalized half-life extending moiety.

[0508] Another useful peptidyl linker is a large, flexible linker comprising a random Gly/Ser/Thr sequence, for example: GSGSATGGSGSTASSGSGSATH (SEQ ID NO:3283) or HGSGSATGGSGSTASSGSGSAT (SEQ ID NO:3284), that is estimated to be about the size of a 1 kDa PEG molecule. Alternatively, a useful peptidyl linker may be comprised of amino acid sequences known in the art to form rigid helical structures (e.g., Rigid linker: -AEAAAKEAAAKEAAAKAGG-//SEQ ID NO:3285). Additionally, a peptidyl linker can also comprise a non-peptidyl segment such as a 6 carbon aliphatic molecule of the formula —CH₂—CH₂—CH₂—CH₂—CH₂—CH₂—. The peptidyl linkers can be altered to form derivatives as described herein.

### Non-Peptidyl Linkers.

[0509] Optionally, a non-peptidyl linker moiety is also useful for conjugating the half-life extending moiety to the peptide portion of the half-life extending moiety-conjugated toxin peptide analog. For example, alkyl linkers such as —NH—(CH₂)ₛ—C(O)—, wherein s=2-20 can be used. These alkyl linkers may further be substituted by any non-sterically hindering group such as lower alkyl (e.g., C₁-C₆) lower acyl, halogen (e.g., Cl, Br), CN, NH₂, phenyl, etc. Exemplary non-peptidyl linkers are PEG linkers (e.g., shown below):

[chemical structure]

[0510] wherein n is such that the linker has a molecular weight of about 100 to about 5000 Daltons (Da), preferably about 100 to about 500 Da.

[0511] In one embodiment, the non-peptidyl linker is aryl. The linkers may be altered to form derivatives in the same manner as described herein. “Aryl” is phenyl or phenyl vicinally-fused with a saturated, partially-saturated, or unsaturated 3-, 4-, or 5 membered carbon bridge, the phenyl or bridge being substituted by 0, 1, 2 or 3 substituents selected from C₁₋₈ alkyl, C₁₋₄ haloalkyl or halo. “Heteroaryl” is an unsaturated 5, 6 or 7 membered monocyclic or partially-saturated or unsaturated 6-, 7-, 8-, 9-, 10- or 11 membered bicyclic ring, wherein at least one ring is unsaturated, the monocyclic and the bicyclic rings containing 1, 2, 3 or 4 atoms selected from N, O and S, wherein the ring is substituted by 0, 1, 2 or 3 substituents selected from C₁₋₈ alkyl, C₁₋₄ haloalkyl and halo.

[0512] Non-peptide portions of the inventive composition of matter, such as non-peptidyl linkers or non-peptide half-life extending moieties can be synthesized by conventional organic chemistry reactions.

[0513] Other embodiments of the multivalent linker comprise a rigid polyheterocyclic core of controlled length. The linkers are chemically differentiated on either end to accommodate orthogonal coupling chemistries (i.e. azide “Click”, amide coupling, thioether formation by alkylation with maleimide or haloacetamide, oxime formation, reductive amination, etc.).

[0514] The above is merely illustrative and not an exhaustive treatment of the kinds of linkers that can optionally be employed in accordance with the present invention.

[0515] In one embodiment, the GLP-1 receptor agonist compound is a peptide that has at least 80% sequence identity to GLP-1(7-37) (SEQ ID NO: 3184); at least 85% sequence identity to GLP-1(7-37) (SEQ ID NO: 3184); at least 90% sequence identity to GLP-1(7-37) (SEQ ID NO: 3184); or at least 95% sequence identity to GLP-1(7-37) (SEQ ID NO: 3184).

[0516] GLP-1 receptor agonist compounds may be prepared by processes well known in the art, e.g., peptide purification as described in Eng et al., J. Biol. Chem., 265:20259-62 (1990); standard solid-phase peptide synthesis techniques as described in Raufman et al., J. Biol. Chem., 267:21432-37 (1992); recombinant DNA techniques as described in Sambrook et al., Molecular Cloning: A Laboratory Manual, 2d Ed., Cold Spring Harbor (1989); and the like.

TABLE 7
Examples of GLP-1 receptor agonist Sequences

| SEQ | | |
|---|---|---|
| ID | | |
| NO: | Sequence | Description |
| 3163 | HGEGTFTSDLSKQMEEEAVRLFIEWLKN | Exendin-4 |
| | GGPSSGAPPPS | |
| 3164 | HSDGTFTSDLSKQMEEEAVRLFIEWLKN | Exendin-3 |
| | GGPSSGAPPPS | |
| 3165 | HGEGTFTSDLSKQLEEEAVRLFIEWLKN | Leu¹⁴-exendin-4 |
| | GGPSSGAPPPS | |
| 3166 | HGEGTFTSDLSKQLEEEAVRLFIEFLKNG | Leu¹⁴, Phe²⁵-exendin-4 |
| | GPSSGAPPPS | |
| 3167 | HGEGTFTSDLSKQLEEEAARLFIEFLKNG | Leu¹⁴, Ala¹⁹, Phe²⁵-exendin-4 |
| | GPSSGAPPPS | |
| 3168 | HGEGTFTSDLSKQMEEEAVRLFIEWLKN | exendin-4(1-30) |
| | GG | |
| 3169 | HGEGTFTSDLSKQLEEEAVRLFIEWLKN | Leu¹⁴-exendin-4(1-30) |
| | GG | |
| 3170 | HGEGTFTSDLSKQLEEEAVRLFIEFLKNG | Leu¹⁴, Phe²⁵-exendin-4(1-30) |
| | G | |
| 3171 | HGEGTFTSDLSKQLEEEAARLFIEFLKNG | Leu¹⁴, Ala¹⁹, Phe²⁵-exendin-4(1-30) |
| | G | |
| 3172 | HGEGTFTSDLSKQMEEEAVRLFIEWLKN | exendin-4(1-28) |
| 3173 | HGEGTFTSDLSKQLEEEAVRLFIEWLKN | Leu¹⁴-exendin-4(1-28) |
| 3174 | HGEGTFTSDLSKQLEEEAVRLFIEFLKN | Leu¹⁴, Phe²⁵-exendin-4(1-28) |
| 3175 | HGEGTFTSDLSKQLEEEAARLFIEFLKN | Leu¹⁴, Ala¹⁹, Phe²⁵-exendin-4 (1-28) |
| 3176 | HGEGTFTSDLSKQLEEKAAKEFIEFLKQG | Leu¹⁴, Lys^{17,20}, Ala¹⁹, Glu²¹, Phe²⁵, Gln²⁸- |
| | GPSSGAPPPS | exendin-4 |
| 3177 | HGEGTFTSDLSKQLEEKAAKEFIEWLKQ | Leu¹⁴, Lys^{17,20}, Ala¹⁹, Glu²¹, Gln²⁸- |
| | GGPSSGAPPPS | exendin-4 |
| 3178 | HGEGTFTSDLSKQ(octylG)EEEAVRLFIE | octylGly¹⁴, Gln²⁸-exendin-4 |
| | WLKQGGPSSGAPPPS | |
| 3179 | HGEGTFTSDLSKQLEEEAVRLFIEWLKQ | Leu¹⁴, Gln²⁸, octylGly³⁴-exendin-4 |
| | GGPSS(octylG)APPPS | |
| 3180 | HGEFTFTSDLSKQLEEEAVRLFIEWLKQG | Phe⁴, Leu¹⁴, Gln²⁸, Lys³³, Glu³⁴, |
| | GPSKEIIS | Ile^{35,36} Ser³⁷-exendin-4(1-37) |
| 3181 | HGEFTFTSDLSKQLEEKAAKEFIEWLKQ | Phe⁴, Leu¹⁴, Lys^{17,20}, Ala¹⁹, Glu²¹, Gln²⁸- |
| | GGPSSGAPPPS | exendin-4 |
| 3182 | HGEGTFTSDLVKILEAEAVRKFIEFLKNG | Val¹¹, Ile¹³, Leu¹⁴, Ala¹⁶, Lys²¹, Phe²⁵- |
| | GPSSGAPPPS | exendin-4 |
| 3183 | HGEGTFTSDLSKQMEEEAVRLFIEWLKN | exendin-4-Lys⁴⁰ |
| | GGPSSGAPPPSK | |
| 3184 | HAEGTFTSDVSSYLEGQAAKEFIAWLVK | GLP-1(7-37) |
| | GRG | |
| 3185 | HAEGTFTSDVSSYLEGQAAKEFIAWLVK | GLP-1(7-36)-NH₂ |
| | GR | |
| 3186 | H(Aib)EGTFTSDVSSYLEGQAAREFIAFLV | Aib^{8,35}, Arg^{26,34}, Phe³¹-GLP-1(7-36)) |
| | R(Aib)R | |
| 3187 | HXaa₈EGTFTSDVSSYLEXaa₂₂Xaa₂₃AAKEF | HXaa₈EGTFTSDVSSYLEXaa₂₂Xaa₂₃ |
| | I | AAKEFIXaa₃₀WLXaa₃₃Xaa₃₄G |
| | Xaa₃₀WLXaa₃₃Xaa₃₄GXaa₃₆Xaa₃₇ | Xaa3₆Xaa₃₇ |
| | wherein Xaa₈ is A, V, or G | wherein Xaa₈ is A, V, or G |
| | Xaa₂₂ is G, K, or E | Xaa₂₂ is G, K, or E |
| | Xaa₂₃ is Q or K | Xaa₂₃ is Q or K |
| | Xaa₃₀ is A or E | Xaa₃₀ is A or E |
| | Xaa₃₃ is Vor K | Xaa₃₃ is V or K |
| | Xaa₃₄ is K, N, or R | Xaa₃₄ is K, N, or R |
| | Xaa₃₆ is R or G | Xaa₃₆ is R or G |
| | and Xaa₃₇ is G, H, P, or absent | and Xaa₃₇ is G, H, P, or absent |
| 3188 | HAEGTFTSDVSSYLEGQAAKEFIAWLVR | Arg³⁴-GLP-1(7-37) |
| | GRG | |
| 3189 | HAEGTFTSDVSSYLEGQAAKEFIEWLVK | Glu³⁰-GLP-1(7-37) |
| | GRG | |
| 3190 | HAEGTFTSDVSSYLEKQAAKEFIAWLVK | Lys²²-GLP-1(7-37) |
| | GRG | |
| 3191 | HGEGTFTSDVSSYLEEQAAKEFIAWLVK | Gly^{8,36}, Glu²²-GLP-1(7-37) |
| | GGG | |
| 3192 | HVEGTFTSDVSSYLEEQAAKEFIAWLVK | Val⁸, Glu²², Gly³⁶-GLP-1(7-37) |
| | GGG | |
| 3193 | HGEGTFTSDVSSYLEEQAAKEFIAWLKN | Gly^{8,36}, Glu²², Lys³³, Asn³⁴-GLP-1(7- |
| | GGG | 37) |
| 3194 | HVEGTFTSDVSSYLEEQAAKEFIAWLKN | Val⁸, Glu²², Lys³³, Asn³⁴, Gly³⁶-GLP- |
| | GGG | 1(7-37) |
| 3195 | HGEGTFTSDVSSYLEEQAAKEFIAWLVK | Gly^{8,36}, Glu²², Pro37-GLP-1(7-37) |
| | GGP | |
| 3196 | HVEGTFTSDVSSYLEEQAAKEFIAWLVK | Val⁸, Glu²², Gly³⁶, Pro³⁷-GLP-1(7-37) |
| | GGP | |
| 3197 | HGEGTFTSDVSSYLEEQAAKEFIAWLKN | Gly^{8,36}, Glu²², Lys³³, Asn³⁴, Pro³⁷-GLP- |
| | GGP | 1(7-37) |
| 3198 | HVEGTFTSDVSSYLEEQAAKEFIAWLKN | Val⁸, Glu²², Lys³³, Asn³⁴, Gly³⁶, Pro³⁷- |
| | GGP | GLP-1(7-37) |
| 3199 | HGEGTFTSDVSSYLEEQAAKEFIAWLVK | Gly^{8,36}, Glu²²-GLP-1(7-36) |
| | GG | |
| 3200 | HVEGTFTSDVSSYLEEQAAKEFIAWLVK | Val⁸, Glu²², Gly³⁶-GLP-1(7-36) |
| | GG | |
| 3201 | HVEGTFTSDVSSYLEEQAAKEFIAWLVN | Val⁸, Glu²², Asn³⁴, Gly³⁶-GLP-1(7-36) |
| | GG | |
| 3202 | HGEGTFTSDVSSYLEEQAAKEFIAWLVN | Gly^{8,36}, Glu²², Asn³⁴-GLP-1(7-36) |
| | GG | |
| 3203 | AESKYGPPCPPCPAPXaa₁₆Xaa₁₇Xaa₁₈GGPS | Fc portion of an immunoglobulin |
| | VFLFPPKPKDTLMISRTPEVTCVVVDVSQ | |
| | EDPEVQFNWYVDGVEVHNAKTKPREEQ | |
| | FXaa₈₀STYRVVSVLTVLHQDWLNGKEYK | |
| | CKVSNKGLPSSIEKTISKAKGQPREPQVY | |
| | TLPPSQEEMTKNQVSLTCLVKGFYPSDIA | |
| | VEWESNGQPENNYKTTPPVLDSDGSFFL | |
| | YSRLTVDKSRWQEGNVFSCSVMHEALH | |
| | NHYTQKSLSLSLGXaa₂₃₀ wherein | |
| | Xaa₁₆ is P or E | |
| | Xaa₁₇ is F, V or A | |
| | Xaa₁₈ is L, E or A | |
| | Xaa₈₀ is N or A | |
| | and Xaa₂₃₀ is K or absent | |
| 3204 | (-GGGGS-)ₓ where x is 1, 2, 3, 4, | Linker |
| | 5 or 6 | |
| 3205 | HGEGTFTSDVSSYLEEQAAKEFIAWLVK | Fc portion of an immunoglobulin |
| | GGGGGGGSGGGGSGGGGSAESKYGPPC | |
| | PPCPAPEAAGGPSVFLFPPKPKDTLMISRT | |
| | PEVTCVVVDVSQEDPEVQFNWYVDGVE | |
| | VHNAKTKPREEQFNSTYRVVSVLTVLHQ | |
| | DWLNGKEYKCKVSNKGLPSSIEKTISKA | |
| | KGQPREPQVYTLPPSQEEMTKNQVSLTC | |
| | LVKGFYPSDIAVEWESNGQPENNYKTTP | |
| | PVLDSDGSFFLYSR | |
| | LTVDKSRWQEGNVFSCSVMHEALHNHY | |
| | TQKSLSLSLG | |
| 3206 | HXaa₈EGTFTSDVS | GLP-1 analog |
| | SYLEXaa₂₂QAAKEFIAWLXaa₃₃KGGPSSG | |
| | APPPC₄₅C₄₆-Z, wherein | |
| | Xaa₈ is: D-Ala, G, V, | |
| | L, I, S or T | |
| | Xaa₂₂ is G, E, D or K | |
| | Xaa₃₃ is: V or I | |
| | and Z is OH or NH₂ and, | |
| | optionally, wherein (i) one | |
| | polyethylene glycol moiety is | |
| | covalently attached to C₄₅, | |
| | (ii) one polyethylene glycol | |
| | moiety is covalently attached | |
| | to C₄₆, or (iii) one polyethylene | |
| | glycol moiety is attached to C₄₅ | |
| | and one polyethylene glycol | |
| | moiety is attached to C₄₆. | |
| 3207 | HVEGTFTSDVSSYLEEQAAKEFIAWLIKG | GLP-1 analog |
| | GPSSGAPPPC₄₅C₄₆-NH₂ and, | |
| | optionally, wherein (i) one | |
| | polyethylene glycol moiety is | |
| | covalently attached to C₄, | |
| | (ii) one polyethylene glycol | |
| | moiety is covalently attached | |
| | to C₄₆, or (iii) one polyethylene | |
| | glycol moiety is attached to C₄₅ | |
| | and one polyethylene glycol | |
| | moiety is attached to C₄₆ | |
| 3208 | HGEGTFTSDLSKQMEEEAVKLFIEWLKN | [N^{e}-(17-carboxyheptadecanoic |
| | GGPSSGAPPPS | acid)Lys²⁰]exendin-4-NH₂ |
| 3209 | HGEGTFTSDLSKQMEEEAVRLFIEWLKN | [N^{e}-(17-carboxyhepta- |
| | GGPKSGAPPPS | decanoyl)Lys³²]exendin-4-NH₂ |
| 3210 | GEGTFTSDLSKQMEEEAVKLFIEWLKNG | [desamino-His¹, N^{e}-(17- |
| | GPSSGAPPPS | carboxyheptadecanoyl)Lys²⁰]exendin- |
| | | 4-NH₂ |
| 3211 | HGEGTFTSDLSRQNorLeEEEAVRLFIEWL | [Arg^{12,27}, NLe¹⁴, N^{e}-(17-carboxy- |
| | RNGGPKSGAPPPS | heptadecanoyl)Lys³²]exendin-4-NH₂ |
| 3212 | HGEGTFTSDLSKQMEEEAVKLFIEWLKN | [N^{e}-(19-carboxy- |
| | GGPSSGAPPPS | nonadecanoylamino)Lys²⁰]-exendin- |
| | | 4-NH₂ |
| 3213 | HGEGTFTSDLSKQMEEEAVKLFIEWLKN | [N^{e}-(15- |
| | GGPSSGAPPPS | carboxypentadecanoylamino)Lys²⁰]- |
| | | exendin-4-NH₂ |
| 3214 | HGEGTFTSDLSKQMEEEAVKLFIEWLKN | [N^{e}-(13- |
| | GGPSSGAPPPS | carboxytridecanoylamino)Lys²⁰] |
| | | exendin-4-NH₂ |
| 3215 | HGEGTFTSDLSKQMEEEAVKLFIEWLKN | [N^{e}-(11-carboxy-undecanoyl- |
| | GGPSSGAPPPS | amino)Lys²⁰]exendin-4-NH₂ |
| 3216 | HGEGTFTSDLSKQMEEEAVRLFIEWLKN | exendin-4-Lys⁴⁰(e-MPA)-NH₂ |
| | GGPSSGAPPPSK | |
| 3217 | HGEGTFTSDLSKQMEEEAVRLFIEWLKN | exendin-4-Lys⁴⁰(e-AEEA-AEEA- |
| | GGPSSGAPPPSK | MPA)-NH₂ |
| 3218 | HGEGTFTSDLSKQMEEEAVRLFIEWLKN | exendin-4-Lys⁴⁰(e-AEEA-MPA)- |
| | GGPSSGAPPPSK | NH₂ |
| 3219 | HGEGTFTSDLSKQMEEEAVRLFIEWLKN | exendin-4-Lys⁴⁰(e-MPA)-albumin |
| | GGPSSGAPPPSK | |
| 3220 | HGEGTFTSDLSKQMEEEAVRLFIEWLKN | exendin-4-Lys⁴⁰(e-AEEA-AEEA- |
| | GGPSSGAPPPSK | MPA)-albumin |
| 3221 | HGEGTFTSDLSKQMEEEAVRLFIEWLKN | exendin-4-Lys⁴⁰(e-AEEA-MPA)- |
| | GGPSSGAPPPSK | albumin |
| 3222 | AEGTFTSDVSSYLEGQAAREFIAWLVKG | desamino-His⁷, Arg²⁶, Lys³⁴(N^{e}-(γ- |
| | RG | Glu(N-α-hexadecanoyl)))-GLP-1(7- |
| | | 37) (core peptide disclosed as |
| | | SEQ ID NO: 3222) |
| 3223 | AEGTFTSDVSSYLEGQAAREFIAWLVKG | desamino-His⁷, Arg²⁶, Lys34(N^{e}- |
| | RG | octanoyl)-GLP-1(7-37) |
| 3224 | HAEGTFTSDVSSYLEGQAAREFIAWLVR | Arg^{26,34}, Lys³⁸(N^{ϵ}-(ω- |
| | GRGK | carboxypentadecanoyl))-GLP-1(7-38) |
| 3225 | HAEGTFTSDVSSYLEGQAAREFIAWLVR | Arg^{26,34}, Lys³⁶(N^{ϵ}-(γ-Glu(N-α- |
| | GRGK | hexadecanoyl)))-GLP-1(7-36) (core |
| | | peptide disclosed as SEQ ID NO: |
| | | 3225) |
| 3226 | H[Aib]EGTFTSDVSSYLEGQAAKEFIAWL | [Aib⁸, Lys³⁷]GLP-1_(7-37) |
| | VKGRK | |
| 3227 | H[Aib]EGTFTSDVSSYLEGQAAKEFIAWL | [Aib⁸, Lys³⁶]GLP-1_(7-37) |
| | VKGKG | |
| 3228 | H[Aib]EGTFTSDVSSYLE[Aib]QAAKEFIA | [Aib^{8,22.}, Lys³⁶]GLP-1(7-36)-Amide |
| | WLVKGK | |
| 3229 | H[Aib]EGTFTSDVSSYLE[Aib]QAAKEFIA | [Aib^{8,22.}, BLeu^{32.} ,Lys³⁶]GLP-1(7-36)- |
| | W[BLeu]VKGK | Amide |
| 3230 | H[Aib]EGTFTSDVSSYLE[Aib]QAAKEFIA | [Aib^{8,22.}, Lys³⁷]GLP-1(7-37)-Amide |
| | WLVKGRK | |
| 3231 | H[Aib]EGTFTSDVSSYLE[Aib]QAAKEFIA | [Aib^{8,22.}, BLeu^{32.}, Lys³⁷]GLP-1(7-37)- |
| | W[BLeu]VKGRK | Amide |
| 3232 | H[Aib]EGTFTSDVSSYLE[Aib]QAAKEFIA | [Aib^{8,22.}, aMeLeu^{32.}, Lys³⁷]GLP-1(7- |
| | W[aMeLeu]VKGRK | 37)-Amide |
| 3233 | H[Aib]EGT[AMEF]TSDVSSYLE[Aib]QAA | [Aib^{8,22.}, AMEF^{12.}, Lys³⁷]GLP-1(7-37)- |
| | KEFIAWLVKGRK | Amide |
| 3234 | H[Aib]EGTFTSD[BLeu]SSYLE[Aib]QAAK | [Aib^{8,22.}, BLeu^{16.}, Lys³⁷]GLP-1(7-37)- |
| | EFIAWLVKGRK | Amide |
| 3235 | H[Aib]EGTFTSDVSSYLE[Aib]QAAKEFIA | [Aib^{8,22.}, Gly³⁶, Lys³⁷]GLP-1(7-37)- |
| | WLVKGGK | Amide |
| 3236 | H[Aib]EGTFTSDVSSYLE[Aib]QAAKEFIA | [Aib^{8,22.}, Lys^{33,37.}, Asn^{34.}, Gly³⁶]GLP-1(7- |
| | WLKNGGK | 37)-Amide |
| 3237 | H[Aib]EGTFTSDVSSYLE[Aib]QAAKEFIA | [Aib^{8,22.}, Lys^{33.}, Asn^{34.}, Gly^{36.}, |
| | WLKNGG[Acea] | Aceea37]GLP-1(7-37)-Aeea-Lys-Amide |
| 3238 | H[Aib]EGTFTSDVSSYLE[Aib]QAAKEFIA | [Aib^{8,22.}, Gly³⁶]GLP-1(7-37) |
| | WLVKGGG | |
| 3239 | H[Aib]EGTFTSDVSSYLEGEAAKKFIAWL | cyclo[E²³-K²⁷][Aib^{8.}, Gly³⁶]GLP-1(7- |
| | VKGGG | 37) |
| 3240 | H[Aib]EGTFTSDVSSYLEEQAAKEKFIAW | cyclo[E²²-K²⁶][Aib^{8.}, Gly^{36.}, Lys³⁷]GLP- |
| | LVKGGK | 1(7-37)-Amide |
| 3241 | H[Aib]EGTFTSDVSSYLE[Aib]EAVRLFIE | [Aib^{8,22}]-GLP-1(7-22)-Ex4(17-39) |
| | WLKNGGPSSGAPPPS | |
| 3242 | HGEGTFTSDVSSYLEEQAAKEFIAWLVK | [Gly^{8,36.}, Glu²²]GLP-1(7-37) |
| | GGG | |
| 3243 | H[Aib]EGTFTSDVSSYLEEQAAKEFIAWL | [Aib^{8.}, Glu^{22.}, Gly³⁶]GLP-1(7-37)- |
| | VKGGG | Amide |
| 3244 | H[Aib]EGTFTSDYSSYLEEQAAKEFIAWL | [Aib^{8.}, Tyr^{16.}, Glu^{22.}, Gly³⁶]GLP-1_(7- |
| | VKGGG | 37) |
| 3245 | H[Aib]EGTFTSDVSKYLEEEAVRLFIEWL | [Aib^{8.}, Lys^{18,33.}, Glu^{22,23,30.}, Val^{25.}, |
| | KNGGG | Arg^{26.}, Leu^{27.}, Asn^{34.}, Gly³⁶]GLP-1(7-37) |
| 3246 | H[Aib]EGTFTSDVSKYLEEEAAKLFIEWL | [Aib^{8.}, Lys^{18,33.}, Glu^{22,23,30.}, Leu^{27.}, |
| | KNGGG | Asn^{34.}, Gly³⁶]GLP-1(7-37) |
| 3247 | H[Aib]EGTFTSDVSKYLEEEAAKLFIEWL | [Aib^{8.}, Lys^{18.}, Glu^{22,22,23,30.}, Leu^{27.}, |
| | VKGGG | Gly³⁶]GLP-1(7-37) |
| 3248 | H[Aib]IGTFTSDVSSYLE[Aib]QAAKEFIA | [Aib^{8,22.}, Ile^{9.}, Gly³⁶]GLP-1_(7-36) |
| | WLVKGG | |
| 3249 | H[Aib]EGTFTSEVSSYLE[Aib]QAAKEFIA | [Aib^{8,22.}, Glu^{15.}, Gly³⁶]GLP-1_(7-36) |
| | WLVKGG | |
| 3286 | {H2}H[Aib]EGTFTSDVSSYLE[Aib]QAAK | |
| | EFIAWLKNGG[Acea]\|Aeea]K{CONH2} | |
| 3287 | {H2}H[Aib]EGTFTSDVSSYLE[Aib]QAAK | |
| | EFIAWLVKGGG | |
| 3288 | {H2}H[Aib]EGTFTSDVSSYLEGEAAKKFI | |
| | AWLVKGGG | |
| 3289 | {H2}H[Aib]EGTFTSDVSSYLEEQAAKEFI | |
| | AWLVKGGK{CONH2} | |
| 3290 | {H2}H[Aib]EGTFTSDVSSYLE[Aib]EAVRL | |
| | FIEWLKNGGPSSGAPPPS | |
| 3291 | {H2}HGEGTFTSDVSSYLEEQAAKEFIAW | |
| | LVKGGG | |
| 3292 | {H2}H[Aib]EGTFTSDVSSYLEEQAAKEFI | |
| | AWLVKGGG | |
| 3293 | {H2}H[Aib]EGTFTSDYSSYLEEQAAKEFI | |
| | AWLVKGGG | |
| 3294 | {H2}H[Aib]EGTFTSDVSKYLEEEAVRLFI | |
| | EWLKNGGG | |
| 3295 | {H2}H[Aib]EGTFTSDVSKYLEEEAAKLFI | |
| | EWLKNGGG | |
| 3296 | {H2}H[Aib]EGTFTSDVSKYLEEEAAKLFI | |
| | EWLVKGGG | |
| 3297 | {H2}H[Aib]IGTFTSDVSSYLE[Aib]QAAKE | |
| | FIAWLVKGG | |
| 3298 | {H2}H[Aib]EGTFTSEVSSYLE[Aib]QAAK | |
| | EFIAWLVKGG | |
| 3299 | {H2}H[Aib]AGTFTSDVSSYLE[Aib]QAAK | |
| | EFIAWLVKGG | |
| 3300 | {H2}H[Aib]EGTFTSDVSSYLE[Aib]QAAK | |
| | EFAAWLVKGG | |
| 3301 | {H2}H[Aib]EGTFTSDVSSYLE[Aib]QAAK | |
| | EFIAALVKGG | |
| 3302 | {H2}H[Aib]TGTFTSDVSSYLE[Aib]QAAK | |
| | EFIAWLVKGGG | |
| 3303 | {H2}H[Aib]EGTFTSEVSSYLE[Aib]QAAK | |
| | EFIAALVKGGG | |
| 3304 | {H2}H[Aib]EGTFTSDVSSYLE[Aib]QAAK | |
| | EFIAALVKGGG | |
| 3305 | {H2}H[Aib]EGTFTSDVSSYLEEEAVRLFIE | |
| | WLKNGGPSSGAPPPS | |
| 3306 | {H2}H[Aib]EGTFTSDYSSYLE[Aib]QAAK | |
| | EFIAWLVKGGG | |
| 3307 | {H2}H[Aib]EGTFTSDVSSYLE[Aib]QAAK | |
| | EFIAWLVKGGG{CONH2} | |
| 3308 | {Dmia}SQGTFTSDYSKYLDERRAKDFVQ | |
| | WLMNT | |
| 3309 | {H2}HGEGTFTSDLSKQMEEEAVRLFIEW | |
| | LKNGGPSSGAPPPS | |

[0517] AEEA refers to [2-(2-amino)ethoxy)]acetic acid
[0518] FDA refers to ethylenediamine.
[0519] MPA refers to maleimidopropionic acid.

### Example 1

### Cathepsin D CRISPR-Cas9 Knockout Generation

### Materials and Methods

### Cathepsin D Knockout Generation

[0520] cathepsin D knockout cell lines currently under consideration were generated using either sgRNA sequence #1 (UAGACGUGAACUUGCGCAGG (SEQ ID NO: 3342)) or sgRNA sequence #2 (GCAAGUUCACGUCUAUCCGU (SEQ ID NO: 3343).

[0521] Synthetic sgRNAs and purified Cas9 were obtained from Synthego. Chemical modifications were introduced to the sgRNA backbone to increase the half-life of the RNA in the cell (2′-O-methyl at first and last bases, 3′ phosphorothioate bonds between first 3 and last 2 base). Purified Cas9 protein was derived from Streptococcus pyogenes, and nuclear localization signals (NLS) were added to both the N- and C-terminus of the Cas9 protein to localize Cas9 to the nucleus for genome editing.

[0522] A CHO cell line expressing an anti-GIPR antibody was used as the cell host. Neon transfection protocol was derived from Synthego. In short, 90 pmols of sgRNA was incubated with 10 pmols of Cas9 at room temperature for ˜10 minutes to from the ribonucleoprotein (RNP) complex (Cas9 protein+synthetic sgRNA). The Neon transfection system (Thermo Fisher) was used for electroporation (1700V, 20 ms width, 1 pulse; 2×10⁵ cells).

[0523] Cells were single-cell sorted 3 days after transfection using the F.Sight (Cytena). Export plates were centrifuged at 1200 rpm for 1 min immediately after sort, and clonality was confirmed by imaging on the Cell Metric (Solentim).

### Cathepsin D Knockout Identification by Sanger Sequencing

[0524] 7 days after single-cell sorting, export plates were duplicated: 1 plate was used for scale-up and 1 plate was sacrificed for genotyping. Cells were lysed in 100 μl of QuickExtract DNA Extraction Solution (Lucigen) according to manufacturer's protocol. Reaction mixture was incubated at 65° C. for 6 minutes and vortexed for 15 seconds. Lysis reaction was stopped by incubating reaction mixture at 98° C. for 2 minutes. sgRNA target region in the genome was amplified using DreamTaq Green PCR Master Mix (Thermo Fisher), a final concentration of 100 nM of forward (5′-GCTGCCCTTAGCTGATTTGG-3′ (SEQ ID NO:3344)) and reverse (5′-GTGTGGCTGAATCTGGAAGC-3′ (SEQ ID NO: 3345)) primers, and 1 μL of lysed DNA. PCR was performed using the ProFlex PCR System (Thermo Fisher) with the following conditions: 95° C. of initial denaturation for 3 minutes followed by 40 cycles of 95° C. for 30 seconds, 60° C. for 30 seconds, 72° C. for 1 minute, and a final extension at 72° C. for 10 minutes. PCR products were purified using MinElute PCR Purification Kit (Qiagen) and subjected to Sanger Sequencing (Genewiz).

Cathepsin D mRNA Level Quantification by RT-ddPCR

[0525] cathepsin D mRNA expression level was measured by Reverse-Transcriptase digital droplet PCR (RT-ddPCR). Briefly, RNA was purified from 5×10⁶ cells using RNeasy Mini kit (Qiagen) according to manufacturer's protocol. To remove DNA contamination, 1 gg of RNA was treated with DNaseI (Thermo Fisher) for 15 minutes at room temperature. DNAse-treated RNA was then reverse-transcribed into cDNA using iScript Advanced cDNA synthesis kit (Bio-Rad) and resulting cDNA was diluted to 0.2 ng/μl in nuclease-free water.

[0526] ddPCR was performed using the QX200 Droplet Digital PCR System according to manufacturer's instruction (Bio-Rad). The ddPCR reaction mix was assembled using the ddPCR Supermix for Probes with no dUTP (Bio-Rad), and a final concentration of 900 nm of forward (cathepsin D: 5′-GATAGAGACAACAATAGGGTCGGC-3′ (SEQ ID NO: 3346), Actin Beta: 5′-GGCTCCCAGCACCATGAA-3′ (SEQ ID NO: 3347)) and reverse primers (cathepsin D: 5′-CTTCCTCTACTGGACTCTGATCCA-3′ (SEQ ID NO: 3348), Actin Beta: 5′-GCCACCGATCCACACAGAGT-3′ (SEQ ID NO: 3349)) primers and 250 nm of FAM and HEX-labeled probes. Each ddPCR reaction contained 1 ng cDNA/well, and each sample was run in triplicate reactions. Reaction mixtures were partitioned into nanoliter-sized droplets using the QX200 AutoDG Droplet Digital PCR System (Bio-Rad) and immediately amplified using the ProFlex PCR System (Thermo Fisher) with the following conditions: 95° C. of enzyme activation for 10 minutes followed by 40 cycles of 94° C. for 30 seconds and 60° C. for 1 minute, with a ramp rate of 2° C. per second. After cycling is completed, enzyme is deactivated at 98° C. for 10 minutes.

[0527] After amplification, each of the partitioned droplets were analyzed on the QX200 Droplet Reader and Quantasoft software v 1.7.4 t to determine whether they contain positive or negative fluorophore signals for target and reference genes. Reactions that contain less than 10,000 accepted droplets are excluded from further analysis. The fraction of positive droplets was fitted to the Poisson algorithm to determine the absolute starting concentration of cDNA molecules in units of copies/μl for both target and reference genes.

### Cathepsin D Protein Level Characterization by Western Blot

[0528] cathepsin D protein level was measured by western blot. Briefly, 1×10⁶ cells were resuspended in 100 μL of lysis buffer comprised of 1× Pierce RIPA Buffer (Thermo Fisher), 1× Halt Protease Inhibitor Cocktail (Thermo Fisher), and 1×EDTA Solution (Thermo Fisher). Cells were incubated on ice for 15 minutes before being centrifuged at 16,000×g for 5 minutes at 4° C. Supernatant was then mixed with 2× NuPAGE LDS Sample Buffer (Thermo Fisher) and 1× NuPAGE Sample Reducing Agent (Thermo Fisher). Samples were incubated at 98° C. for 30 seconds before being loaded onto a NuPAGE 4-12% Bis-Tris SDS gel (Thermo Fisher) and run at 100V for ˜60 minutes using an XCell SureLock Mini-Cell (Thermo Fisher). Transfer onto a PVDF membrane was accomplished using iBlot 2 Transfer Stacks (Thermo Fisher) and the iBlot 2 Dry Blotting System (Thermo Fisher) running at 20V for 10 minutes. Membrane was blocked with 5% Blotting-Grade Blocker (Bio-Rad) dissolved in 1× tris buffered saline (Thermo Fisher) and 0.1% Tween-20 (Thermo Fisher) (PBS-T)—referred to as Blocking Buffer. Primary anti-cathepsin D antibody (Abcam, ab75852) was diluted 1:5000 in Blocking Buffer and incubated with the membrane overnight at 4° C. Membrane was washed 3× with 1×PBS-T before incubating at room temperature for 1 hour with anti-rabbit secondary antibody directly conjugated to horseradish peroxidase (Abcam, ab205718), which was diluted 1:10000 in Blocking Buffer. Membrane was washed 3× with 1×PBS-T before being activated with SuperSignal West Dura Extended Duration Substrate (Thermo Fisher). Imaging was performed on the ChemiDoc MP Imaging System (Bio-Rad).

### Protein Production Evaluation

[0529] Growth and titer were evaluated by fed-bath in 24-deep well plates (Axygen) with a working volume of 3.5 mL. Cells were incubated at 36° C., 5% CO₂, and 85% relative humidity and shaken at 225 rpm with 50 mm orbital dimeter in a large-capacity ISF4-X incubator (Kuhner). Cultures were inoculated at a target cell density of 8×10⁵ cells/mL and fed a single bolus feed on days 3, 6, and 8 using chemically defined media. In-process samples were taken from cultures on days 0, 3, 6, 8, and 10 for analysis. Cell counts and viability were determined using a Vi-cell XR cell counter (Beckman Coulter). Day 10 titers were measured by affinity Protein A high performance liquid chromatography (Waters).

### In Vitro Cathepsin D Activity Assay

[0530] cathepsin D activity was measured using a cathepsin D Activity Assay Kit (fluorometric) with modifications to the manufacturer's instructions (Abcam, ab65302). In brief, all samples were prepared by mixing 0.5 mg of protein with CD Cell Lysis Buffer. A dilution standard was prepared with human cathepsin D (Abcam, ab91123). CD Reaction Buffer and CD Substrate were mixed in a 10:1 ratio before being added to samples. Fluorescence was quantified at 328/460 nm (excitation wavelength/emission wavelength) using Infinite 200 PRO (Tecan). cathepsin D activity was calculated relative to the standard curve.

LENGTHY TABLES
The patent application contains a lengthy table section. A copy of the table is available in electronic form from the USPTO web site (https://seqdata.uspto.gov/?pageRequest=docDetail&DocID=US20250108121A1). An electronic copy of the table will also be available from the USPTO upon request and payment of the fee set forth in 37 CFR 1.19(b)(3).

The application's sequence listing, which the Patent Office published only in electronic form, follows.

SEQUENCE LISTING (3356 sequences)

SEQ ID NO: 1 - protein, 111 aa, synthetic construct
QSVLTQPPSASGTPGQRVTISCSGSSSNIGSNTVNWYQHLPGTAPKLLIYTNNQRPSGVPDRFSGSKSGTSASLAISGLQSEDEADYFCATFDDSLNGPVFGGGTKLTVLG

SEQ ID NO: 2 - protein, 108 aa, synthetic construct
DIQMTQSPSSLSASIGDRVTITCRASQDIRDYLGWYQQKPGKAPKRLIYGASSLQSGVPSRFSGSGSGTEFTLTISSLQPEDFATYYCLQHNNYPFTFGPGTKVDIKR

SEQ ID NO: 3 - protein, 108 aa, synthetic construct; identical to SEQ ID NO: 2

SEQ ID NO: 4 - protein, 107 aa, synthetic construct
DIQMTQSPSSLSASVGDRVTITCQASQDISNYLNWYQQKPGKAPKLLIYDASNLETGVPSRFSGSGSGTDFSFTISSLQPEDIATYYCQQYDILLTFGGGTKVEIKR

SEQ ID NO: 5 - protein, 114 aa, synthetic construct
DIVMTQSPDSLAVSLGERATINCKSSQSVLSSSNNKNYIAWYQQQPGHPPKLLIYWASTRESGVPDRFSGSGSGTDFTLTISSLQAEDVAVFYCQQYYSTPWTFGQGTKVEIKR

SEQ ID NO: 6 - protein, 114 aa, synthetic construct
DIVMTQSPDSLAVSLGERATINCKSSQSVLSSSNNKNYIAWYQQKPGHPPKLLIYWASTRESGVPDRFSGSGSGTDFTLTISSLQAEDVAVFYCQQYYSTPWTFGQGTKVEIKR

SEQ ID NO: 7 - protein, 114 aa, synthetic construct
DIVMTQSPDSLSVSLGERATINCKSSQSVLSSSNNKNYLAWYQQKPGQPPNLLIYWTSTRDSGVPDRFSGSGSGTDFTLTINSLQAEDVAVYYCQQYYRTPWTFGQGTKVEIKR

SEQ ID NO: 8 - protein, 114 aa, synthetic construct; identical to SEQ ID NO: 7

SEQ ID NO: 9 - protein, 109 aa, synthetic construct
EIVLTQSPGTLSLSPGERATLSCRASQSISYSYLAWYQQKPGQAPRLLIYGASSRATGIPDRFSGSGSGTDFTLTISRQEPDDFAVYYCQQYGSSPLTFGGGTKVEIKR

SEQ ID NO: 10 - protein, 108 aa, synthetic construct
EIVMTQSPATLSVSPGERATLSCRASQSVSSNLAWYQQKPGQAPRLLIYGAATRATGIPARVSGSGSGTEFTLTISSLQSEDFAVYYCQQYNNWPLTFGGGTKVEIKR

SEQ ID NO: 11 - protein, 108 aa, synthetic construct
DIQMTQSPSSLSASVGDRVTITCRASQGIRNELGWYQQKPGKAPKRLIYGASSLQSGVPSRFSGSGSGTEFTLTISSLQPEDFVTYYCLQHNSYPFTFGPGTKVDVKR

SEQ ID NO: 12 - protein, 107 aa, synthetic construct
DIQMTQSPSSLSASVGDRVTITCQASQDITNYLNWYQQKPGKAPKLLIYDASNLEPGVPSRFSGSGSGTDFTFTISSLQPEDIATYYCQQYDDLFTFGPGTKVDIKR

SEQ ID NO: 13 - protein, 108 aa, synthetic construct
DIQMTQSPSSVSASVGDRVTITCRASQGLIIWLAWYQQKPGKAPKLLIYAASSLQSGVPSRFSGSGSGTDFTLTISSLQPEDFATYYCQQTNSFPPTFGQGTKVEIKR

SEQ ID NO: 14 - protein, 108 aa, synthetic construct; identical to SEQ ID NO: 13

SEQ ID NO: 15 - protein, 108 aa, synthetic construct
DIQMTQSPSSLSASVGDRVTITCRASQGIRNELGWYQQKPGKAPKLLIYGASSLQSGVPSRFSGSGSGTEFTLTISSLQPEDFVTYYCLQHNSYPFTFGQGTKVDVKR

SEQ ID NO: 16 - protein, 108 aa, synthetic construct; identical to SEQ ID NO: 15

SEQ ID NO: 17 - protein, 108 aa, synthetic construct; identical to SEQ ID NO: 15

SEQ ID NO: 18 - protein, 108 aa, synthetic construct
DIQMTQSPSSLSASVGDRVTITCRASQGIRNELGWYQQKPGKAPKLLIYGASSLQSGVPSRFSGSGSGTEFTLTISSLQPEDFVTYYCLQHNSYPFTFGPGTKVDVKR

SEQ ID NO: 19 - protein, 108 aa, synthetic construct
DIQMTQSPSSLSASVGDRVTITCRASQGIRNELGWYQQKPGKAPKRLIYGASSLQSGVPSRFSGSGSGTEFTLTISSLQPEDFVTYYCLQHNSYPFTFGQGTKVDVKR

SEQ ID NO: 20 - protein, 108 aa, synthetic construct; identical to SEQ ID NO: 15

SEQ ID NO: 21 - protein, 108 aa, synthetic construct
DIQMTQSPSSLSASIGDRVTITCRASQDIRDYLGWYQQKPGKAPKLLIYGASSLQSGVPSRFSGSGSGTEFTLTISSLQPEDFATYYCLQHNNYPFTFGQGTKVDIKR

SEQ ID NO: 22 - protein, 108 aa, synthetic construct
DIQMTQSPSSLSASIGDRVTITCRASQDIRDYLGWYQQKPGKAPKRLIYGASSLQSGVPSRFSGSGSGTEFTLTISSLQPEDFATYYCLQHNNYPFTFGQGTKVDIKR

SEQ ID NO: 23 - protein, 108 aa, synthetic construct
DIQMTQSPSSLSASIGDRVTITCRASQDIRDYLGWYQQKPGKAPKLLIYGASSLQSGVPSRFSGSGSGTEFTLTISSLQPEDFATYYCLQHNNYPFTFGPGTKVDIKR

SEQ ID NO: 24 - protein, 108 aa, synthetic construct; identical to SEQ ID NO: 21

SEQ ID NO: 25 - protein, 108 aa, synthetic construct; identical to SEQ ID NO: 21

SEQ ID NO: 26 - protein, 108 aa, synthetic construct; identical to SEQ ID NO: 21

SEQ ID NO: 27 - protein, 108 aa, synthetic construct; identical to SEQ ID NO: 21

SEQ ID NO: 28 - protein, 108 aa, synthetic construct
DIQMTQSPSSLSASIGDRVTITCRASQDLRNYLGWYHQKPGKAPKRLIYGASSLQSGVPSRFSGSGSGTEFTLTISSLQPEDFATYYCLQHNNYPFTFGPGTKVDIKR

SEQ ID NO: 29 - protein, 108 aa, synthetic construct
DIQMTQSPSSLSASIGDRVTITCRASQDLRNYLGWYQQKPGKAPKLLIYGASSLQSGVPSRFSGSGSGTEFTLTISSLQPEDFATYYCLQHNNYPFTFGPGTKVDIKR

SEQ ID NO: 30 - protein, 108 aa, synthetic construct; identical to SEQ ID NO: 29

SEQ ID NO: 31 - protein, 108 aa, synthetic construct
DIQMTQSPSSLSASIGDRVTITCRASQDLRNYLGWYHQKPGKAPKLLIYGASSLQSGVPSRFSGSGSGTEFTLTISSLQPEDFATYYCLQHNNYPFTFGPGTKVDIKR

SEQ ID NO: 32 - protein, 108 aa, synthetic construct
DIQMTQSPSSLSASIGDRVTITCRASQDLRNYLGWYQQKPGKAPKRLIYGASSLQSGVPSRFSGSGSGTEFTLTISSLQPEDFATYYCLQHNNYPFTFGPGTKVDIKR

SEQ ID NO: 33 - protein, 108 aa, synthetic construct; identical to SEQ ID NO: 32

SEQ ID NO: 34 - protein, 108 aa, synthetic construct; identical to SEQ ID NO: 31

SEQ ID NO: 35 - protein, 108 aa, synthetic construct; identical to SEQ ID NO: 28

SEQ ID NO: 36 - protein, 108 aa, synthetic construct; identical to SEQ ID NO: 29

SEQ ID NO: 37 - protein, 108 aa, synthetic construct; identical to SEQ ID NO: 29

SEQ ID NO: 38 - protein, 108 aa, synthetic construct
DIQMTQSPSSLSASIGDRVTITCRASQDLRNYLGWYQQKPGKAPKLLIYGASSLQSGVPSRFSGSGSGTEFTLTISSLQPEDFATYYCLQHNNYPFTFGQGTKVDIKR

SEQ ID NO: 39 - protein, 108 aa, synthetic construct; identical to SEQ ID NO: 29

SEQ ID NO: 40 - protein, 107 aa, synthetic construct
DIQMTQSPSSLSASVGDRVTITCQASQDISNYLNWYQQKPGKAPKLLIYDASNLETGVPSRFSGSGSGTDFSLTISSLQPEDFATYYCQQYDILLTFGGGTKVEIKR

SEQ ID NO: 41 - protein, 107 aa, synthetic construct; identical to SEQ ID NO: 40

SEQ ID NO: 42 - protein, 107 aa, synthetic construct
DIQMTQSPSSLSASVGDRVTITCQASQDISNYLNWYQQKPGKAPKLLIYDASNLETGVPSRFSGSGSGTDFSLTISSLQPEDIATYYCQQYDILLTFGGGTKVEIKR

SEQ ID NO: 43 - protein, 107 aa, synthetic construct
DIQMTQSPSSLSASVGDRVTITCQASQDISNYLNWYQQKPGKAPKLLIYDASNLETGVPSRFSGSGSGTDFSFTISSLQPEDFATYYCQQYDILLTFGGGTKVEIKR

SEQ ID NO: 44 - protein, 107 aa, synthetic construct; identical to SEQ ID NO: 42

SEQ ID NO: 45 - protein, 107 aa, synthetic construct; identical to SEQ ID NO: 43

SEQ ID NO: 46 - protein, 107 aa, synthetic construct; identical to SEQ ID NO: 4

SEQ ID NO: 47 - protein, 107 aa, synthetic construct; identical to SEQ ID NO: 40

SEQ ID NO: 48 - protein, 107 aa, synthetic construct; identical to SEQ ID NO: 40

SEQ ID NO: 49 - protein, 108 aa, synthetic construct; identical to SEQ ID NO: 2

SEQ ID NO: 50 - protein, 108 aa, synthetic construct; identical to SEQ ID NO: 2

SEQ ID NO: 51 - protein, 108 aa, synthetic construct; identical to SEQ ID NO: 21

SEQ ID NO: 52 - protein, 108 aa, synthetic construct; identical to SEQ ID NO: 21

SEQ ID NO: 53 - protein, 108 aa, synthetic construct; identical to SEQ ID NO: 23

SEQ ID NO: 54 - protein, 108 aa, synthetic construct; identical to SEQ ID NO: 23

SEQ ID NO: 55 - protein, 108 aa, synthetic construct; identical to SEQ ID NO: 23

SEQ ID NO: 56 - protein, 107 aa, synthetic construct
DIQMTQSPSSLSASVGDRVTITCQASQDITNYLNWYQQKPGKAPKLLIYDASNLEPGVPSRFSGSGSGTDFTLTISSLQPEDFATYYCQQYDDLFTFGPGTKVDIKR

SEQ ID NO: 57 - protein, 107 aa, synthetic construct
DIQMTQSPSSLSASVGDRVTITCQASQDITNYLNWYQQKPGKAPKLLIYDASNLEPGVPSRFSGSGSGTDFTLTISSLQPEDIATYYCQQYDDLFTFGPGTKVDIKR

SEQ ID NO: 58 - protein, 107 aa, synthetic construct; identical to SEQ ID NO: 56

SEQ ID NO: 59 - protein, 107 aa, synthetic construct
DIQMTQSPSSLSASVGDRVTITCQASQDITNYLNWYQQKPGKAPKLLIYDASNLEPGVPSRFSGSGSGTDFTFTISSLQPEDFATYYCQQYDDLFTFGPGTKVDIKR

SEQ ID NO: 60 - protein, 107 aa, synthetic construct; identical to SEQ ID NO: 57

SEQ ID NO: 61 - protein, 107 aa, synthetic construct; identical to SEQ ID NO: 59

SEQ ID NO: 62 - protein, 107 aa, synthetic construct; identical to SEQ ID NO: 12

SEQ ID NO: 63 - protein, 107 aa, synthetic construct; identical to SEQ ID NO: 56

SEQ ID NO: 64 - protein, 107 aa, synthetic construct; identical to SEQ ID NO: 56

SEQ ID NO: 65 - protein, 107 aa, synthetic construct
DIQMTQSPSSLSASVGDRVTITCQASQDITNYLNWYQQKPGKAPKLLIYDASNLEPGVPSRFSGSGSGTDFTLTISSLQPEDFATYYCQQYDDLFTFGQGTKVDIKR

SEQ ID NO: 66 - protein, 107 aa, synthetic construct; identical to SEQ ID NO: 65

SEQ ID NO: 67 - protein, 108 aa, synthetic construct
EIVLTQSPGTLSLSPGERATLSCRASQIFTSTYLAWYQQKPGQAPRLLIYGASSRATGIPDRFSGSGSGTDFTLTISRLEPEDFAVYYCQQYGSSPRFGQGTRLEIKR

SEQ ID NO: 68 - protein, 108 aa, synthetic construct; identical to SEQ ID NO: 67

SEQ ID NO: 69 - protein, 108 aa, synthetic construct; identical to SEQ ID NO: 67

SEQ ID NO: 70 - protein, 108 aa, synthetic construct; identical to SEQ ID NO: 67

SEQ ID NO: 71 - protein, 108 aa, synthetic construct
EIVMTQSPATLSVSPGERATLSCRASQSVSSNLAWYQQKPGQAPRLLIYGAATRATGIPARFSGSGSGTEFTLTISSLQSEDFAVYYCQQYNNWPLTFGGGTKVEIKR

SEQ ID NO: 72 - protein, 108 aa, synthetic construct; identical to SEQ ID NO: 71

SEQ ID NO: 73 - protein, 108 aa, synthetic construct; identical to SEQ ID NO: 71

SEQ ID NO: 74 - protein, 108 aa, synthetic construct; identical to SEQ ID NO: 10

SEQ ID NO: 75 - protein, 108 aa, synthetic construct
EIVMTQSPATLSVSPGERATLSCRASQSVSSNLAWYQQKPGQAPRLLIYGAATRATGIPARFSGSGSGTEFTLTISSLEPEDFAVYYCQQYNNFPLTFGGGTKVEIKR

SEQ ID NO: 76 - protein, 108 aa, synthetic construct
EIVMTQSPATLSVSPGERATLSCRASQSVSSNLAWYQQKPGQAPRLLIYGAATRATGIPARFSGSGSGTEFTLTISSLEPEDFAVYYCQQYNNYPLTFGGGTKVEIKR

SEQ ID NO: 77 - protein, 108 aa, synthetic construct
EIVMTQSPATLSVSPGERATLSCRASQSVSSNLAWYQQKPGQAPRLLIYGAATRATGIPARFSGSGSGTEFTLTISSLEPEDFAVYYCQQYNNWPLTFGGGTKVEIKR

SEQ ID NO: 78 - protein, 108 aa, synthetic construct; identical to SEQ ID NO: 77

SEQ ID NO: 79 - protein, 109 aa, synthetic construct
EIVLTQSPGTLSLSPGERATLSCRASQSISYSYLAWYQQKPGQAPRLLIYGASSRATGIPDRFSGSGSGTDFTLTISRLEPDDFAVYYCQQYGSSPLTFGGGTKVEIKR

SEQ ID NO: 80 - protein, 109 aa, synthetic construct; identical to SEQ ID NO: 9

SEQ ID NO: 81 - protein, 109 aa, synthetic construct; identical to SEQ ID NO: 79

SEQ ID NO: 82 - protein, 109 aa, synthetic construct; identical to SEQ ID NO: 79

SEQ ID NO: 83 - protein, 109 aa, synthetic construct; identical to SEQ ID NO: 79

SEQ ID NO: 84 - protein, 109 aa, synthetic construct; identical to SEQ ID NO: 9

SEQ ID NO: 85 - protein, 109 aa, synthetic construct; identical to SEQ ID NO: 9

SEQ ID NO: 86 - protein, 114 aa, synthetic construct; identical to SEQ ID NO: 5

SEQ ID NO: 87 - protein, 114 aa, synthetic construct; identical to SEQ ID NO: 5

SEQ ID NO: 88 - protein, 114 aa, synthetic construct; identical to SEQ ID NO: 5

SEQ ID NO: 89 - protein, 114 aa, synthetic construct; identical to SEQ ID NO: 5

SEQ ID NO: 90 - protein, 114 aa, synthetic construct; identical to SEQ ID NO: 5

SEQ ID NO: 91 - protein, 114 aa, synthetic construct; identical to SEQ ID NO: 5

SEQ ID NO: 92 - protein, 114 aa, synthetic construct; identical to SEQ ID NO: 5

SEQ ID NO: 93 - protein, 114 aa, synthetic construct; identical to SEQ ID NO: 5

SEQ ID NO: 94 - protein, 114 aa, synthetic construct; identical to SEQ ID NO: 5

SEQ ID NO: 95 - protein, 114 aa, synthetic construct
DIVMTQSPDSLAVSLGERATINCKSSQSVLSSSNNKNYIAWYQQKPGQPPKLLIYWASTRESGVPDRFSGSGSGTDFTLTISSLQAEDVAVFYCQQYYSTPWTFGQGTKVEIKR

SEQ ID NO: 96 - protein, 114 aa, synthetic construct; identical to SEQ ID NO: 95

SEQ ID NO: 97 - protein, 114 aa, synthetic construct
DIVMTQSPDSLSVSLGERATINCKSSQSVLSSSNNKNYLAWYQQKPGQPPNLLIYWTSTRESGVPDRFSGSGSGTDFTLTINSLQAEDVAVYYCQQYYRTPWTFGQGTKVEIKR

SEQ ID NO: 98 - protein, 114 aa, synthetic construct; identical to SEQ ID NO: 97

SEQ ID NO: 99 - protein, 114 aa, synthetic construct; identical to SEQ ID NO: 7

SEQ ID NO: 100 - protein, 114 aa, synthetic construct; identical to SEQ ID NO: 97

SEQ ID NO: 101 - protein, 114 aa, synthetic construct; identical to SEQ ID NO: 97

SEQ ID NO: 102 - protein, 114 aa, synthetic construct; identical to SEQ ID NO: 7

SEQ ID NO: 103 - protein, 114 aa, synthetic construct; identical to SEQ ID NO: 7

SEQ ID NO: 104 - protein, 114 aa, synthetic construct
DIVMTQSPDSLAVSLGERATINCKSSQSVLSSSNNKNYLAWYQQKPGQPPKLLIYWTSTRESGVPDRFSGSGSGTDFTLTINSLQAEDVAVYYCQQYYRTPWTFGQGTKVEIKR

SEQ ID NO: 105 - protein, 114 aa, synthetic construct; identical to SEQ ID NO: 97

SEQ ID NO: 106 - protein, 114 aa, synthetic construct; identical to SEQ ID NO: 6

SEQ ID NO: 107 - protein, 114 aa, synthetic construct; identical to SEQ ID NO: 6

SEQ ID NO: 108 - protein, 114 aa, synthetic construct; identical to SEQ ID NO: 6

SEQ ID NO: 109 - protein, 114 aa, synthetic construct; identical to SEQ ID NO: 95

SEQ ID NO: 110 - protein, 114 aa, synthetic construct; identical to SEQ ID NO: 95

SEQ ID NO: 111 - protein, 114 aa, synthetic construct; identical to SEQ ID NO: 7

SEQ ID NO: 112 - protein, 114 aa, synthetic construct; identical to SEQ ID NO: 7

SEQ ID NO: 113 - protein, 114 aa, synthetic construct; identical to SEQ ID NO: 7

SEQ ID NO: 114 - protein, 114 aa, synthetic construct; identical to SEQ ID NO: 7

SEQ ID NO: 115 - protein, 114 aa, synthetic construct; identical to SEQ ID NO: 7

SEQ ID NO: 116 - protein, 114 aa, synthetic construct; identical to SEQ ID NO: 7

SEQ ID NO: 117 - protein, 114 aa, synthetic construct; identical to SEQ ID NO: 7

SEQ ID NO: 118 - protein, 114 aa, synthetic construct; identical to SEQ ID NO: 97

SEQ ID NO: 119 - protein, 114 aa, synthetic construct; identical to SEQ ID NO: 97

SEQ ID NO: 120 - protein, 114 aa, synthetic construct; identical to SEQ ID NO: 97

SEQ ID NO: 121 - protein, 114 aa, synthetic construct; identical to SEQ ID NO: 97

SEQ ID NO: 122 - protein, 114 aa, synthetic construct
DIVMTQSPDSLAVSLGERATINCKSSQSVLSSSNNKNYLAWYQQKPGQPPKLLIYWTSTRDSGVPDRFSGSGSGTDFTLTINSLQAEDVAVYYCQQYYRTPWTFGQGTKVEIKR

SEQ ID NO: 123 - protein, 114 aa, synthetic construct; identical to SEQ ID NO: 104

SEQ ID NO: 124 - protein, 111 aa, synthetic construct
QSVLTQPPSASGTPGQRVTISCSGSSSNIGSQTVNWYQHLPGTAPKLLIYTNNQRPSGVPDRFSGSKSGTSASLAISGLQSEDEADYFCATFDESLSGPVFGGGTKLTVLG

SEQ ID NO: 125 - protein, 111 aa, synthetic construct
QSVLTQPPSASGTPGQRVTISCSGSSSNIGSQTVNWYQHLPGTAPKLLIYTNNQRPSGVPDRFSGSKSGTSASLAISGLQSEDEADYFCATFDESLQGPVFGGGTKLTVLG

SEQ ID NO: 126 - protein, 111 aa, synthetic construct
QSVLTQPPSASGTPGQRVTISCSGSSSNIGSNYVNWYQHLPGTAPKLLIYTNNQRPSGVPDRFSGSKSGTSASLAISGLQSEDEADYFCATFDESLSGPVFGGGTKLTVLG

SEQ ID NO: 127 - protein, 111 aa, synthetic construct
QSVLTQPPSASGTPGQRVTISCSGSSSNIGSNYVNWYQHLPGTAPKLLIYTNNQRPSGVPDRFSGSKSGTSASLAISGLQSEDEADYFCATFDESLQGPVFGGGTKLTVLG

SEQ ID NO: 128 - protein, 111 aa, synthetic construct
QSVLTQPPSASGTPGQRVTISCSGSSSNIGSQTVNWYQHLPGTAPKLLIYTNNQRPSGVPDRFSGSKSGTSASLAISGLQSEDEADYFCATFDDSLNGPVFGGGTKLTVLG

SEQ ID NO: 129 - protein, 111 aa, synthetic construct
QSVLTQPPSASGTPGQRVTISCSGSSSNIGSNYVNWYQHLPGTAPKLLIYTNNQRPSGVPDRFSGSKSGTSASLAISGLQSEDEADYFCATFDDSLNGPVFGGGTKLTVLG

SEQ ID NO: 130 - protein, 111 aa, synthetic construct
QSVLTQPPSASGTPGQRVTISCSGSSSNIGSNTVNWYQHLPGTAPKLLIYTNNQRPSGVPDRFSGSKSGTSASLAISGLQSEDEADYFCATFDESLNGPVFGGGTKLTVLG

SEQ ID NO: 131 - protein, 111 aa, synthetic construct
QSVLTQPPSASGTPGQRVTISCSGSSSNIGSNTVNWYQHLPGTAPKLLIYTNNQRPSGVPDRFSGSKSGTSASLAISGLQSEDEADYFCATFDDSLQGPVFGGGTKLTVLG

SEQ ID NO: 132 - protein, 111 aa, synthetic construct
QSVLTQPPSASGTPGQRVTISCSGSSSNIGSNTVNWYQHLPGTAPKLLIYTNNQRPSGVPDRFSGSKSGTSASLAISGLQSEDEADYFCATFDDSLSGPVFGGGTKLTVLG

SEQ ID NO: 133 - protein, 111 aa, synthetic construct
QSVLTQPPSASGTPGQRVTISCSGSSSNIGSNTVNWYQHLPGTAPKLLIYTNNQRPSGVPDRFSGSKSGTSASLAISGLQSEDEADYFCATFDDSLNAPVFGGGTKLTVLG

SEQ ID NO: 134 - protein, 111 aa, synthetic construct
QSVLTQPPSASGTPGQRVTISCSGSSSNIGSNTVNWYQHLPGTAPKLLIYTNNQRPSGVPDRFSGSKSGTSASLAISGLQSEDEADYFCATFDSSLNGPVFGGGTKLTVLG

SEQ ID NO: 135 - protein, 111 aa, synthetic construct
QSVLTQPPSASGTPGQRVTISCSGSSSNIGSNYVNWYQHLPGTAPKLLIYTNNQRPSGVPDRFSGSKSGTSASLAISGLQSEDEADYFCATFDSSLNAPVFGGGTKLTVLG

SEQ ID NO: 136 - protein, 111 aa, synthetic construct; identical to SEQ ID NO: 135

SEQ ID NO: 137 - protein, 111 aa, synthetic construct; identical to SEQ ID NO: 124

SEQ ID NO: 138 - protein, 108 aa, synthetic construct
DIQMTQSPSSLSASIGDRVTITCRASQDLRNYLGWYQQKPGKAPKRLIYGASSLQSGVPSRFSGSGSGTEFTLTISSLQPEDFATYYCLQHNNYPFTFGQGTKVDIKR

SEQ ID NO: 139 - protein, 108 aa, synthetic construct; identical to SEQ ID NO: 22

SEQ ID NO: 140 - protein, 111 aa, synthetic construct
QSVLTQPPSASGTPGQRVTISCSGSSSNIGSNTVNWYQQLPGTAPKLLIYTNNQRPSGVPDRFSGSKSGTSASLAISGLQSEDEADYFCATFDSSLSGPVFGGGTKLTVLG

SEQ ID NO: 141 - protein, 108 aa, synthetic construct
DIQLTQSPSSLSASVGDRVTITCRASQTISRFLNWYQQKPGKAPELLIYVASSLQSGVPSRFSGSGSGTDFTLTISSLQPEDFATYYCQQSYSTLISFGQGTKLEITR

SEQ ID NO: 142 - protein, 111 aa, synthetic construct
QSVLTQPPSVSAAPGQKVTISCSGSSSNIGNNYVSWYEQFPGTAPKLLIYDNNKRPSGIPDRFSGSKSGTSATLGITGLQTGDEADYYCGTWDSSLSAVVFGGGTKLTVLG

SEQ ID NO: 143 - protein, 108 aa, synthetic construct
DIQLTQSPSSLSASVGDRVTITCRASQTISRFLNWYQQKPGKAPELLIYVASSLQSGVPSRFSGSGSGTDFTLTISSLQPEDFATYYCQQSYSTLISFGQGTKLEIKR

SEQ ID NO: 144 - protein, 108 aa, synthetic construct; identical to SEQ ID NO: 143

SEQ ID NO: 145 - protein, 108 aa, synthetic construct; identical to SEQ ID NO: 141

SEQ ID NO: 146 - protein, 108 aa, synthetic construct
DIQLTQSPSSLSASVGDRVTITCRASQTISRFLNWYQQKPGKAPKLLIYVASSLQSGVPSRFSGSGSGTDFTLTISSLQPEDFATYYCQQSYSTLISFGQGTKLEIKR

SEQ ID NO: 147 - protein, 108 aa, synthetic construct; identical to SEQ ID NO: 143

SEQ ID NO: 148 - protein, 108 aa, synthetic construct; identical to SEQ ID NO: 143

SEQ ID NO: 149 - protein, 111 aa, synthetic construct
QSVLTQPPSVSAAPGQKVTISCSGSSSNIGNNYVSWYQQLPGTAPKLLIYDNNKRPSGIPDRFSGSKSGTSATLGITGLQTGDEADYYCGTWDSSLSAVVFGGGTKLTVLG

SEQ ID NO: 150 - protein, 111 aa, synthetic construct; identical to SEQ ID NO: 149

SEQ ID NO: 151 - protein, 111 aa, synthetic construct; identical to SEQ ID NO: 142

SEQ ID NO: 152 - protein, 111 aa, synthetic construct
QSVLTQPPSVSAAPGQKVTISCSGSSSNIGNNYVSWYQQLPGTAPKLLIYDNNKRPSGIPDRFSGSKSGTSATLAITGLQTGDEADYYCGTFESSLSAVVFGGGTKLTVLG

SEQ ID NO: 153 - protein, 111 aa, synthetic construct
QSVLTQPPSVSAAPGQKVTISCSGSSSNIGNNYVSWYQQLPGTAPKLLIYDNNKRPSGIPDRFSGSKSGTSATLAITGLQTGDEADYYCGTWDSSLSAVVFGGGTKLTVLG

SEQ ID NO: 154 - protein, 111 aa, synthetic construct; identical to SEQ ID NO: 153

SEQ ID NO: 155 - protein, 111 aa, synthetic construct; identical to SEQ ID NO: 149

SEQ ID NO: 156 - protein, 111 aa, synthetic construct; identical to SEQ ID NO: 152

SEQ ID NO: 157 - protein, 108 aa, synthetic construct
DIQLTQSPSSLSASVGDRVTITCRASQTISRFLNWYQQKPGKAPKLLIYVASSLQSGVPSRFSGSGSGTDFTLTISSLQPEDFATYYCQQSYSTLLSFGQGTKLEIKR

SEQ ID NO: 158 - protein, 128 aa, synthetic construct
QMQVVQSGAEVKKPGASVKVSCKASGYTFTGYYMHWVRQAPGQGLEWMGWINPNSGGTNYAQKFQGRVTMTRDTSISTAYMELSRLRSDDTAVYYCARGGDYVWGTYRPHYYYGMDVWGQGTTVTVSS

SEQ ID NO: 159 - protein, 121 aa, synthetic construct
QVQLVESGGGVVQPGRSLRLSCAASGFTFSNFGMHWVRQAPGKGLEWVAVIWYDGSNENYADSVKGRFTISRDNSKNTLYLHMNSLRVADTAVYYCARDGTIFGVVLGDYWGQGTLVTVSS

SEQ ID NO: 160 - protein, 121 aa, synthetic construct
QVQLVESGGGVVQPGRSLRLSCAASGFTFSYFGMHWVRQAPGKGLEWVAVIWYDGSNKYYADSVKGRFTISRDNSKNTLYLQMNSLRAEDTAVYYCARDGTIFGVLLGDYWGQGTLVTVSS

SEQ ID NO: 161 - protein, 120 aa, synthetic construct
QVQLVESGGGVVQPGRSLRLSCAASGFTFSSYGMHWVRQAPGKGLEWVAVIWYDGSNKYYADSVKGRFTISSDNSKNTLYLQMNSLRAEDTAVYYCARDRTIFGVVLDYWGQGTLVTVSS

SEQ ID NO: 162 - protein, 123 aa, synthetic construct
QVPLVQSGAEVKKPGASVKVSCKASGYTFTGYYIHWVRQAPGQGLEWMGWINPDSGGTDYSQRFQGRFTMTRDTSISTAYMELNRLRSDDTAVYYCAREATIFGMVIVPFDYWGQGTLVTVSS

SEQ ID NO: 163 - protein, 123 aa, synthetic construct
QVPLVQSGAEVKKPGASVKVSCKASGYTFTGYYIHWVRQAPGQGLEWMGWINPDSGGTDYSQRFQGRFTMTRDTSISTAYMELSRLRSDDTAVYYCAREATIFGMVIVPFDYWGQGTLVTVSS

SEQ ID NO: 164 - protein, 123 aa, synthetic construct
QVPLVQSGAEVKKPGASVKVSCKASGYTFTGYYIHWVRQAPGQGLVWMGWISPNSGDTSYAQKFQDRVTMTRDTSISTAYMELSRLRSDDTAVYFCTREATIFGMLIVPFDYWGQGTLVTVSS

SEQ ID NO: 165 - protein, 123 aa, synthetic construct
QVPLVQSGAEVKKPGASVKVSCKASGYTFTGYYIHWVRQAPGQGLEWMGWISPNNGDTNYAQKFQDRVTMTRDTSISTAYMELSRLRSDDTAVYYCTREATIFGMLIVPFDYWGQGTLVTVSS

SEQ ID NO: 166 - protein, 126 aa, synthetic construct
QVQLQESGPGLVKPSQTLSLTCTVSGDSISSGGYYWSWIRQHPGKGLEWIGYIYYSGSTYYNPSLKSRVTISVDTSKNQFSLKLSSVTAADTAVYYCARDRITIFGVVMGGGMDVWGQGTTVTVSS

SEQ ID NO: 167 - protein, 120 aa, synthetic construct
QVQLVESGGGVVQPGRSLRLSCAASGFTFSNYGMHWVRQAPGEGLEWVAAIWFDGSDKYYADSVKGRFTISRDNSKNTLYLQMNSLRAEDTAVYYCARDQAIFGVVPDYWGQGTLVTVSS

SEQ ID NO: 168 - protein, 121 aa, synthetic construct; identical to SEQ ID NO: 160

SEQ ID NO: 169 - protein, 120 aa, synthetic construct
QVQLVESGGGVVQPGRSLRLSCAASGFSFSSYGMHWVRQPPGKGLEWVAAIWYDGNNKYYADSVKGRFTISRDSSKNTLYLQMNSLRAEDTAVYYCARDRTIFGVVLEYLGQGTLVTVSS

SEQ ID NO: 170 - protein, 117 aa, synthetic construct
QVQLQESGPGLVKPSETLSLTCTVSQGSISSYYWSWIRQPAGKGLEWIGRIYTSGSTNYNPSLKSRVTMSIDTSKNQFSLKLNSVTAADTAVYYCARDVAVAGFDYWGQGTLVTVSS

SEQ ID NO: 171 - protein, 117 aa, synthetic construct
QVQLQESGPGLVKPSETLSLTCTVSGGSISSYYWSWIRQPAGKGLEWIGRIYTSGSTNYNPSLKSRVTMSIDTSKNQFSLKLNSVTAADTAVYYCARDVAVAGFDYWGQGTLVTVSS

SEQ ID NO: 172 - protein, 121 aa, synthetic construct
QVQLVESGGGVVQPGRSLRLSCAASGFTFSYFGMHWVRQAPGKGLEWVAVIWYDASNKYYADAVKGRFTISRDNSKNTLYLQMNSLRAEDTAVYYCARDGTIFGVLLGDYWGQGTLVTVSS

SEQ ID NO: 173 - protein, 121 aa, synthetic construct
QVQLVESGGGVVQPGRSLRLSCAASGFTFSYFGMHWVRQAPGKGLEWVAVIWYDASNKYYADSVKGRFTISRDNSKNTLYLQMNSLRAEDTAVYYCARDGTIFGVLLGDYWGQGTLVTVSS

SEQ ID NO: 174 - protein, 121 aa, synthetic construct
QVQLVESGGGVVQPGRSLRLSCAASGFTFSYFGMHWVRQAPGKGLEWVAVIWYDGSNKYYADAVKGRFTISRDNSKNTLYLQMNSLRAEDTAVYYCARDGTIFGVLLGDYWGQGTLVTVSS

SEQ ID NO: 175 - protein, 121 aa, synthetic construct; identical to SEQ ID NO: 172

SEQ ID NO: 176 - protein, 121 aa, synthetic construct; identical to SEQ ID NO: 172

SEQ ID NO: 177 - protein, 121 aa, synthetic construct
QVQLVESGGGVVQPGRSLRLSCAASGFTFSYFGMHWVRQAPGKGLEWVAVIWYDASNKYYADAVKGRFTISRDNSKNTLYLQMNSLRAEDTAVYYCARDRTIFGVLLGDYWGQGTLVTVSS

SEQ ID NO: 178 - protein, 121 aa, synthetic construct
QVQLVESGGGVVQPGRSLRLSCAASGFTFSNFGMHWVRQAPGKGLEWVAVIWYDASNENYADAVKGRFTISRDNSKNTLYLQMNSLRVADTAVYYCARDGTIFGVVLGDYWGQGTLVTVSS

SEQ ID NO: 179 - protein, 121 aa, synthetic construct; identical to SEQ ID NO: 178

SEQ ID NO: 180 - protein, 121 aa, synthetic construct; identical to SEQ ID NO: 178

SEQ ID NO: 181 - protein, 121 aa, synthetic construct
QVQLVESGGGVVQPGRSLRLSCAASGFTFSNFGMHWVRQAPGKGLEWVAVIWYDASNENYADSVKGRFTISRDNSKNTLYLHMNSLRVADTAVYYCARDGTIFGVVLGDYWGQGTLVTVSS

SEQ ID NO: 182 - protein, 121 aa, synthetic construct
QVQLVESGGGVVQPGRSLRLSCAASGFTFSNFGMHWVRQAPGKGLEWVAVIWYDGSNENYADAVKGRFTISRDNSKNTLYLHMNSLRVADTAVYYCARDGTIFGVVLGDYWGQGTLVTVSS

SEQ ID NO: 183 - protein, 121 aa, synthetic construct
QVQLVESGGGVVQPGRSLRLSCAASGFTFSNFGMHWVRQAPGKGLEWVAVIWYDASNENYADAVKGRFTISRDNSKNTLYLQMNSLRVEDTAVYYCARDRTIFGVVLGDYWGQGTLVTVSS

SEQ ID NO: 184 - protein, 121 aa, synthetic construct
QVQLVESGGGVVQPGRSLRLSCAASGFTFSNFGMHWVRQAPGKGLEWVAVIWYDASNENYADAVKGRFTISRDNSKNTLYLQMNSLRVEDTAVYYCARDGTIFGVVLGDYWGQGTLVTVSS

SEQ ID NO: 185 - protein, 121 aa, synthetic construct
QVQLVESGGGVVQPGRSLRLSCAASGFTFSNFGMHWVRQAPGKGLEWVAVIWYDGSNENYADSVKGRFTISRDNSKNTLYLHMNSLRAADTAVYYCARDGTIFGVVLGDYWGQGTLVTVSS

SEQ ID NO: 186 - protein, 121 aa, synthetic construct
QVQLVESGGGVVQPGRSLRLSCAASGFTFSNFGMHWVRQAPGKGLEWVAVIWYDASNENYADAVKGRFTISRDNSKNTLYLQMNSLRAADTAVYYCARDGTIFGVVLGDYWGQGTLVTVSS

SEQ ID NO: 187 - protein, 121 aa, synthetic construct
QVQLVESGGGVVQPGRSLRLSCAASGFTFSNFGMHWVRQAPGKGLEWVAVIWYDASNENYADAVKGRFTISRDNSKNTLYLHMNSLRAADTAVYYCARDGTIFGVVLGDYWGQGTLVTVSS

SEQ ID NO: 188 - protein, 121 aa, synthetic construct; identical to SEQ ID NO: 186

SEQ ID NO: 189 - protein, 121 aa, synthetic construct; identical to SEQ ID NO: 186

SEQ ID NO: 190 - protein, 121 aa, synthetic construct; identical to SEQ ID NO: 187

SEQ ID NO: 191 - protein, 121 aa, synthetic construct; identical to SEQ ID NO: 187

SEQ ID NO: 192 - protein, 121 aa, synthetic construct; identical to SEQ ID NO: 186

SEQ ID NO: 193 - protein, 121 aa, synthetic construct
QVQLVESGGGVVQPGRSLRLSCAASGFTFSNFGMHWVRQAPGKGLEWVAVIWYDGSNENYADAVKGRFTISRDNSKNTLYLQMNSLRAADTAVYYCARDGTIFGVVLGDYWGQGTLVTVSS

SEQ ID NO: 194 - protein, 121 aa, synthetic construct
QVQLVESGGGVVQPGRSLRLSCAASGFTFSNFGMHWVRQAPGKGLEWVAVIWYDASNENYADSVKGRFTISRDNSKNTLYLQMNSLRAADTAVYYCARDGTIFGVVLGDYWGQGTLVTVSS

SEQ ID NO: 195 - protein, 121 aa, synthetic construct
QVQLVESGGGVVQPGRSLRLSCAASGFTFSNFGMHWVRQAPGKGLEWVAVIWYDASNENYADAVKGRFTISRDNSKNTLYLQMNSLRAEDTAVYYCARDRTIFGVVLGDYWGQGTLVTVSS

SEQ ID NO: 196 - protein, 121 aa, synthetic construct
QVQLVESGGGVVQPGRSLRLSCAASGFTFSNFGMHWVRQAPGKGLEWVAVIWYDASNENYADAVKGRFTISRDNSKNTLYLQMNSLRAEDTAVYYCARDGTIFGVVLGDYWGQGTLVTVSS

SEQ ID NO: 197 - protein, 120 aa, synthetic construct
QVQLVESGGGVVQPGRSLRLSCAASGFTFSSYGMHWVRQAPGKGLEWVAVIWYDASNKYYADAVKGRFTISRDNSKNTLYLQMNSLRAEDTAVYYCARDRTIFGVVLDYWGQGTLVTVSS

SEQ ID NO: 198 - protein, 120 aa, synthetic construct
QVQLVESGGGVVQPGRSLRLSCAASGFTFSSYGMHWVRQAPGKGLEWVAVIWYDASNKYYADAVKGRFTISSDNSKNTLYLQMNSLRAEDTAVYYCARDRTIFGVVLDYWGQGTLVTVSS

SEQ ID NO: 199 - protein, 120 aa, synthetic construct; identical to SEQ ID NO: 197

SEQ ID NO: 200 - protein, 120 aa, synthetic construct; identical to SEQ ID NO: 197

SEQ ID NO: 201 - protein, 120 aa, synthetic construct; identical to SEQ ID NO: 198

SEQ ID NO: 202 - protein, 120 aa, synthetic construct; identical to SEQ ID NO: 198

SEQ ID NO: 203 - protein, 120 aa, synthetic construct; identical to SEQ ID NO: 197

SEQ ID NO: 204 - protein, 120 aa, synthetic construct
QVQLVESGGGVVQPGRSLRLSCAASGFTFSSYGMHWVRQAPGKGLEWVAVIWYDASNKYYADSVKGRFTISRDNSKNTLYLQMNSLRAEDTAVYYCARDRTIFGVVLDYWGQGTLVTVSS

SEQ ID NO: 205 - protein, 120 aa, synthetic construct
QVQLVESGGGVVQPGRSLRLSCAASGFTFSSYGMHWVRQAPGKGLEWVAVIWYDGSNKYYADAVKGRFTISRDNSKNTLYLQMNSLRAEDTAVYYCARDRTIFGVVLDYWGQGTLVTVSS

SEQ ID NO: 206 - protein, 121 aa, synthetic construct; identical to SEQ ID NO: 172

SEQ ID NO: 207 - protein, 121 aa, synthetic construct; identical to SEQ ID NO: 177

SEQ ID NO: 208 - protein, 121 aa, synthetic construct; identical to SEQ ID NO: 172

SEQ ID NO: 209 - protein, 121 aa, synthetic construct; identical to SEQ ID NO: 177

SEQ ID NO: 210 - protein, 121 aa, synthetic construct; identical to SEQ ID NO: 160

SEQ ID NO: 211 - protein, 121 aa, synthetic construct; identical to SEQ ID NO: 173

SEQ ID NO: 212 - protein, 121 aa, synthetic construct; identical to SEQ ID NO: 174

SEQ ID NO: 213 - protein, 120 aa, synthetic construct
QVQLVESGGGVVQPGRSLRLSCAASGFSFSSYGMHWVRQPPGKGLEWVAAIWYDANNKYYADAVKGRFTISRDSSKNTLYLQMNSLRAEDTAVYYCARDRTIFGVVLEYWGQGTLVTVSS

SEQ ID NO: 214 - protein, 120 aa, synthetic construct; identical to SEQ ID NO: 213

SEQ ID NO: 215 - protein, 120 aa, synthetic construct
QVQLVESGGGVVQPGRSLRLSCAASGFSFSSYGMHWVRQPPGKGLEWVAAIWYDANNKYYADAVKGRFTISRDSSKNTLYLQMNSLRAEDTAVYYCARDRTIFGVVLEYLGQGTLVTVSS

SEQ ID NO: 216 - protein, 120 aa, synthetic construct; identical to SEQ ID NO: 213

SEQ ID NO: 217 - protein, 120 aa, synthetic construct; identical to SEQ ID NO: 215

SEQ ID NO: 218 - protein, 120 aa, synthetic construct; identical to SEQ ID NO: 215

SEQ ID NO: 219 - protein, 120 aa, synthetic construct; identical to SEQ ID NO: 213

SEQ ID NO: 220 - protein, 120 aa, synthetic construct
QVQLVESGGGVVQPGRSLRLSCAASGFSFSSYGMHWVRQPPGKGLEWVAAIWYDGNNKYYADAVKGRFTISRDSSKNTLYLQMNSLRAEDTAVYYCARDRTIFGVVLEYWGQGTLVTVSS

SEQ ID NO: 221 - protein, 120 aa, synthetic construct
QVQLVESGGGVVQPGRSLRLSCAASGFSFSSYGMHWVRQPPGKGLEWVAAIWYDANNKYYADSVKGRFTISRDSSKNTLYLQMNSLRAEDTAVYYCARDRTIFGVVLEYWGQGTLVTVSS

SEQ ID NO: 222 - protein, 120 aa, synthetic construct; identical to SEQ ID NO: 213

SEQ ID NO: 223 - protein, 120 aa, synthetic construct; identical to SEQ ID NO: 215

SEQ ID NO: 224 - protein, 120 aa, synthetic construct
QVQLVESGGGVVQPGRSLRLSCAASGFSFSSYGMHWVRQAPGKGLEWVAVIWYDASNKYYEDAVKGRFTISRDNSKNTLFLQVNSLRAEDTAVYYCARGITIFGHGFEYWGQGTLVTVSS

SEQ ID NO: 225 - protein, 120 aa, synthetic construct
QVQLVESGGGVVQPGRSLRLSCAASGFSFSSYGMHWVRQAPGKGLEWVAVIWYDGSNKYYEDSVKGRFTISRDNSKNTLFLQVNSLRAEDTAVYYCARGITIFGHGFEYWGQGTLVTVSS

SEQ ID NO: 226 - protein, 120 aa, synthetic construct
QVQLVESGGGVVQPGRSLRLSCAASGFSFSSYGMHWVRQAPGKGLEWVAVIWYDGSNKYYEDAVKGRFTISRDNSKNTLFLQVNSLRAEDTAVYYCARGITIFGHGFEYWGQGTLVTVSS

SEQ ID NO: 227 - protein, 120 aa, synthetic construct
QVQLVESGGGVVQPGRSLRLSCAASGFSFSSYGMHWVRQAPGKGLEWVAVIWYDASNKYYEDSVKGRFTISRDNSKNTLFLQVNSLRAEDTAVYYCARGITIFGHGFEYWGQGTLVTVSS

SEQ ID NO: 228 - protein, 120 aa, synthetic construct
QVQLVESGGGVVQPGRSLRLSCAASGFTFSNYGMHWVRQAPGEGLEWVAAIWFDASDKYYADAVKGRFTISRDNSKNTLYLQMNSLRAEDTAVYYCARDQAIFGVVPDYWGQGTLVTVSS

SEQ ID NO: 229 - protein, 120 aa, synthetic construct
QVQLVESGGGVVQPGRSLRLSCAASGFTFSNYGMHWVRQAPGEGLEWVAAIWFDASDKYYADSVKGRFTISRDNSKNTLYLQMNSLRAEDTAVYYCARDQAIFGVVPDYWGQGTLVTVSS

SEQ ID NO: 230 - protein, 120 aa, synthetic construct
QVQLVESGGGVVQPGRSLRLSCAASGFTFSNYGMHWVRQAPGEGLEWVAAIWFDGSDKYYADAVKGRFTISRDNSKNTLYLQMNSLRAEDTAVYYCARDQAIFGVVPDYWGQGTLVTVSS

SEQ ID NO: 231 - protein, 120 aa, synthetic construct; identical to SEQ ID NO: 228

SEQ ID NO: 232 - protein, 120 aa, synthetic construct
QVQLVESGGGVVQPGRSLRLSCAASGFTFSNYGMHWVRQAPGKGLEWVAAIWFDASDKYYADAVKGRFTISRDNSKNTLYLQMNSLRAEDTAVYYCARDQAIFGVVPDYWGQGTLVTVSS

SEQ ID NO: 233 - protein, 120 aa, synthetic construct; identical to SEQ ID NO: 232

SEQ ID NO: 234 - protein, 120 aa, synthetic construct; identical to SEQ ID NO: 228

SEQ ID NO: 235 - protein, 120 aa, synthetic construct; identical to SEQ ID NO: 232

SEQ ID NO: 236 - protein, 126 aa, synthetic construct
QVQLQESGPGLVKPSETLSLTCTVSGDSISSGGYYWSWIRQPPGKGLEWIGYIYYSGSTYYNPSLKSRVTISVDTSKNQFSLKLSSVTAADTAVYYCARDRITIFGVVMGGGMDVWGQGTTVTVSS

SEQ ID NO: 237 - protein, 126 aa, synthetic construct; identical to SEQ ID NO: 236

SEQ ID NO: 238 - protein, 126 aa, synthetic construct
QVQLQESGPGLVKPSQTLSLTCTVSGDSISSGGYYWSWIRQPPGKGLEWIGYIYYSGSTYYNPSLKSRVTISVDTSKNQFSLKLSSVTAADTAVYYCARDRITIFGVVMGGGMDVWGQGTTVTVSS

SEQ ID NO: 239 - protein, 126 aa, synthetic construct
QVQLQESGPGLVKPSETLSLTCTVSGDSISSGGYYWSWIRQHPGKGLEWIGYIYYSGSTYYNPSLKSRVTISVDTSKNQFSLKLSSVTAADTAVYYCARDRITIFGVVMGGGMDVWGQGTTVTVSS

SEQ ID NO: 240 - protein, 126 aa, synthetic construct; identical to SEQ ID NO: 166

SEQ ID NO: 241 - protein, 126 aa, synthetic construct; identical to SEQ ID NO: 239

SEQ ID NO: 242 - protein, 126 aa, synthetic construct; identical to SEQ ID NO: 238

SEQ ID NO: 243 - protein, 123 aa, synthetic construct
QVQLVQSGAEVKKPGASVKVSCKASGYTFTGYYIHWVRQAPGQGLEWMGWINPESGGTDYSQRFQGRVTMTRDTSISTAYMELNRLRSDDTAVYYCAREATIFGMVIVPFDYWGQGTLVTVSS

SEQ ID NO: 244 - protein, 123 aa, synthetic construct
QVPLVQSGAEVKKPGASVKVSCKASGYTFTGYYIHWVRQAPGQGLEWMGWINPESGGTDYSQRFQGRFTMTRDTSISTAYMELNRLRSDDTAVYYCAREATIFGMVIVPFDYWGQGTLVTVSS

SEQ ID NO: 245 - protein, 123 aa, synthetic construct
QVQLVQSGAEVKKPGASVKVSCKASGYTFTGYYIHWVRQAPGQGLEWMGWINPDAGGTDYSQRFQGRVTMTRDTSISTAYMELNRLRSDDTAVYYCAREATIFGMVIVPFDYWGQGTLVTVSS

SEQ ID NO: 246 - protein, 123 aa, synthetic construct
QVPLVQSGAEVKKPGASVKVSCKASGYTFTGYYIHWVRQAPGQGLEWMGWINPDAGGTDYSQRFQGRFTMTRDTSISTAYMELNRLRSDDTAVYYCAREATIFGMVIVPFDYWGQGTLVTVSS

SEQ ID NO: 247 - protein, 123 aa, synthetic construct
QVQLVQSGAEVKKPGASVKVSCKASGYTFTGYYIHWVRQAPGQGLEWMGWINPDSGGTDYSQRFQGRVTMTRDTSISTAYMELNRLRSDDTAVYYCAREATIFGMVIVPFDYWGQGTLVTVSS

SEQ ID NO: 248 - protein, 123 aa, synthetic construct
QVQLVQSGAEVKKPGASVKVSCKASGYTFTGYYIHWVRQAPGQGLEWMGWINPDSGGTDYSQRFQGRFTMTRDTSISTAYMELNRLRSDDTAVYYCAREATIFGMVIVPFDYWGQGTLVTVSS

SEQ ID NO: 249 - protein, 123 aa, synthetic construct
QVPLVQSGAEVKKPGASVKVSCKASGYTFTGYYIHWVRQAPGQGLEWMGWINPDSGGTDYSQRFQGRVTMTRDTSISTAYMELNRLRSDDTAVYYCAREATIFGMVIVPFDYWGQGTLVTVSS

SEQ ID NO: 250 - protein, 123 aa, synthetic construct
QVQLVQSGAEVKKPGASVKVSCKASGYTFTGYYIHWVRQAPGQGLEWMGWINPDAGGTDYSQRFQGRFTMTRDTSISTAYMELNRLRSDDTAVYYCAREATIFGMVIVPFDYWGQGTLVTVSS

SEQ ID NO: 251 - protein, 123 aa, synthetic construct
QVPLVQSGAEVKKPGASVKVSCKASGYTFTGYYIHWVRQAPGQGLEWMGWINPDAGGTDYSQRFQGRVTMTRDTSISTAYMELNRLRSDDTAVYYCAREATIFGMVIVPFDYWGQGTLVTVSS

SEQ ID NO: 252 - protein, 123 aa, synthetic construct
QVQLVQSGAEVKKPGASVKVSCKASGYTFTGYYIHWVRQAPGQGLEWMGWINPDAGGTDYSQRFQGRVTMTRDTSISTAYMELNSLRSDDTAVYYCAREATIFGMVIVPFDYWGQGTLVTVSS

SEQ ID NO: 253 - protein, 123 aa, synthetic construct
QVQLVQSGAEVKKPGASVKVSCKASGYTFTGYYIHWVRQAPGQGLEWMGWINPESGGTDYSQRFQGRVTMTRDTSISTAYMELNSLRSDDTAVYYCAREATIFGMVIVPFDYWGQGTLVTVSS

SEQ ID NO: 254 - protein, 123 aa, synthetic construct
QVPLVQSGAEVKKPGASVKVSCKASGYTFTGYYIHWVRQAPGQGLVWMGWISPNSGETSYAQKFQDRVTMTRDTSISTAYMELSRLRSDDTAVYFCAREATIFGMLIVPFDYWGQGTLVTVSS

SEQ ID NO: 255 - protein, 123 aa, synthetic construct
QVPLVQSGAEVKKPGASVKVSCKASGYTFTGYYIHWVRQAPGQGLVWMGWISPNSGDTSYAQKFQDRVTMTRDTSISTAYMELSRLRSDDTAVYFCAREATIFGMLIVPFDYWGQGTLVTVSS

SEQ ID NO: 256 - protein, 123 aa, synthetic construct; identical to SEQ ID NO: 254

SEQ ID NO: 257 - protein, 123 aa, synthetic construct
QVPLVQSGAEVKKPGASVKVSCKASGYTFTGYYIHWVRQAPGQGLVWMGWISPNSGETSYAQKFQDRVTMTRDTSISTAYMELSRLRSDDTAVYFCTREATIFGMLIVPFDYWGQGTLVTVSS

SEQ ID NO: 258 - protein, 123 aa, synthetic construct; identical to SEQ ID NO: 164

SEQ ID NO: 259 - protein, 123 aa, synthetic construct; identical to SEQ ID NO: 257

SEQ ID NO: 260 - protein, 123 aa, synthetic construct; identical to SEQ ID NO: 255

SEQ ID NO: 261 - protein, 123 aa, synthetic construct
QVQLVQSGAEVKKPGASVKVSCKASGYTFTGYYIHWVRQAPGQGLEWMGWISPNSGETSYAQKFQDRVTMTRDTSISTAYMELSSLRSDDTAVYFCAREATIFGMLIVPFDYWGQGTLVTVSS

SEQ ID NO: 262 - protein, 123 aa, synthetic construct
QVQLVQSGAEVKKPGASVKVSCKASGYTFTGYYIHWVRQAPGQGLEWMGWISPNSGETSYAQKFQDRVTMTRDTSISTAYMELSRLRSDDTAVYFCAREATIFGMLIVPFDYWGQGTLVTVSS

SEQ ID NO: 263 - protein, 123 aa, synthetic construct
QVPLVQSGAEVKKPGASVKVSCKASGYTFTGYYIHWVRQAPGQGLEWMGWINPESGGTDYSQRFQGRVTMTRDTSISTAYMELSRLRSDDTAVYYCAREATIFGMVIVPFDYWGQGTLVTVSS

SEQ ID NO: 264 - protein, 123 aa, synthetic construct
QVPLVQSGAEVKKPGASVKVSCKASGYTFTGYYIHWVRQAPGQGLEWMGWINPESGGTDYSQRFQGRFTMTRDTSISTAYMELSRLRSDDTAVYYCAREATIFGMVIVPFDYWGQGTLVTVSS

SEQ ID NO: 265 - protein, 123 aa, synthetic construct
QVPLVQSGAEVKKPGASVKVSCKASGYTFTGYYIHWVRQAPGQGLEWMGWINPDSGGTDYSQRFQGRVTMTRDTSISTAYMELSRLRSDDTAVYYCAREATIFGMVIVPFDYWGQGTLVTVSS

SEQ ID NO: 266 - protein, 123 aa, synthetic construct
QVQLVQSGAEVKKPGASVKVSCKASGYTFTGYYIHWVRQAPGQGLEWMGWINPESGGTDYSQRFQGRVTMTRDTSISTAYMELSSLRSDDTAVYYCAREATIFGMVIVPFDYWGQGTLVTVSS

SEQ ID NO: 267 - protein, 123 aa, synthetic construct; identical to SEQ ID NO: 263

SEQ ID NO: 268 - protein, 123 aa, synthetic construct
QVPLVQSGAEVKKPGASVKVSCKASGYTFTGYYIHWVRQAPGQGLEWMGWISPNQGETNYAQKFQDRVTMTRDTSISTAYMELSRLRSDDTAVYYCAREATIFGMLIVPFDYWGQGTLVTVSS

SEQ ID NO: 269 - protein, 123 aa, synthetic construct
QVPLVQSGAEVKKPGASVKVSCKASGYTFTGYYIHWVRQAPGQGLEWMGWISPNQGDTNYAQKFQDRVTMTRDTSISTAYMELSRLRSDDTAVYYCAREATIFGMLIVPFDYWGQGTLVTVSS

SEQ ID NO: 270 - protein, 123 aa, synthetic construct
QVPLVQSGAEVKKPGASVKVSCKASGYTFTGYYIHWVRQAPGQGLEWMGWISPNQGETNYAQKFQDRVTMTRDTSISTAYMELSRLRSDDTAVYYCTREATIFGMLIVPFDYWGQGTLVTVSS

SEQ ID NO: 271 - protein, 123 aa, synthetic construct
QVPLVQSGAEVKKPGASVKVSCKASGYTFTGYYIHWVRQAPGQGLEWMGWISPNNGETNYAQKFQDRVTMTRDTSISTAYMELSRLRSDDTAVYYCAREATIFGMLIVPFDYWGQGTLVTVSS

SEQ ID NO: 272 - protein, 123 aa, synthetic construct
QVPLVQSGAEVKKPGASVKVSCKASGYTFTGYYIHWVRQAPGQGLEWMGWISPNNGDTNYAQKFQDRVTMTRDTSISTAYMELSRLRSDDTAVYYCAREATIFGMLIVPFDYWGQGTLVTVSS

SEQ ID NO: 273 - protein, 123 aa, synthetic construct
QVPLVQSGAEVKKPGASVKVSCKASGYTFTGYYIHWVRQAPGQGLEWMGWISPNQGDTNYAQKFQDRVTMTRDTSISTAYMELSRLRSDDTAVYYCTREATIFGMLIVPFDYWGQGTLVTVSS

SEQ ID NO: 274 - protein, 123 aa, synthetic construct
QVPLVQSGAEVKKPGASVKVSCKASGYTFTGYYIHWVRQAPGQGLEWMGWISPNNGETNYAQKFQDRVTMTRDTSISTAYMELSRLRSDDTAVYYCTREATIFGMLIVPFDYWGQGTLVTVSS

SEQ ID NO: 275 - protein, 123 aa, synthetic construct; identical to SEQ ID NO: 268

SEQ ID NO: 276 - protein, 123 aa, synthetic construct; identical to SEQ ID NO: 272

SEQ ID NO: 277 - protein, 123 aa, synthetic construct; identical to SEQ ID NO: 269

SEQ ID NO: 278 - protein, 123 aa, synthetic construct; identical to SEQ ID NO: 271

SEQ ID NO: 279 - protein, 123 aa, synthetic construct
QVQLVQSGAEVKKPGASVKVSCKASGYTFTGYYIHWVRQAPGQGLEWMGWISPNQGETNYAQKFQDRVTMTRDTSISTAYMELSSLRSDDTAVYYCAREATIFGMLIVPFDYWGQGTLVTVSS

SEQ ID NO: 280 - protein, 123 aa, synthetic construct; identical to SEQ ID NO: 279

SEQ ID NO: 281 - protein, 128 aa, synthetic construct; identical to SEQ ID NO: 158

SEQ ID NO: 282 - protein, 128 aa, synthetic construct; identical to SEQ ID NO: 158

SEQ ID NO: 283 - protein, 128 aa, synthetic construct; identical to SEQ ID NO: 158

SEQ ID NO: 284 - protein, 128 aa, synthetic construct; identical to SEQ ID NO: 158

SEQ ID NO: 285 - protein, 128 aa, synthetic construct; identical to SEQ ID NO: 158

SEQ ID NO: 286 - protein, 128 aa, synthetic construct; identical to SEQ ID NO: 158

SEQ ID NO: 287 - protein, 128 aa, synthetic construct; identical to SEQ ID NO: 158

SEQ ID NO: 288 - protein, 128 aa, synthetic construct; identical to SEQ ID NO: 158

SEQ ID NO: 289 - protein, 128 aa, synthetic construct; identical to SEQ ID NO: 158

SEQ ID NO: 290 - protein, 128 aa, synthetic construct; identical to SEQ ID NO: 158

SEQ ID NO: 291 - protein, 128 aa, synthetic construct; identical to SEQ ID NO: 158

SEQ ID NO: 292 - protein, 128 aa, synthetic construct; identical to SEQ ID NO: 158

SEQ ID NO: 293 - protein, 128 aa, synthetic construct
QMQVVQSGAEVKKPGASVKVSCKASGYTFTGYYMHWVRQAPGQGLEWMGWINPNSGGTNYAQKFQGRVTMTRDTSISTAYMELSSLRSDDTAVYYCARGGDYVFGTYRPHYYYGMDVWGQGTTVTVSS

SEQ ID NO: 294 - protein, 128 aa, synthetic construct
QMQVVQSGAEVKKPGASVKVSCKASGYTFTGYYMHWVRQAPGQGLEWMGWINPNSGGTNYAQKFQGRVTMTRDTSISTAYMELSRLRSDDTAVYYCARGGDYVFGTYRPHYYYGMDVWGQGTTVTVSS

SEQ ID NO: 295 - protein, 121 aa, synthetic construct; identical to SEQ ID NO: 195

SEQ ID NO: 296 - protein, 121 aa, synthetic construct; identical to SEQ ID NO: 177

SEQ ID NO: 297 - protein, 128 aa, synthetic construct; identical to SEQ ID NO: 158

SEQ ID NO: 298 - protein, 121 aa, synthetic construct
QVQLVESGGGVVQPGRSLRLSCTASGFTFSSYGIHWVRQAPGKGLEWVAVIWYDGSNKFHADSVKGRFTISRDNSKNTLYLQMNSLRAEDSAMYFCARGKVAGMPEAFEIWGQGTKVTVSS

SEQ ID NO: 299 - protein, 129 aa, synthetic construct
QMQLVQSGAEVKKPGASVKVSCKASGYTFTSYDINWVRQATGQGLEWMGWMNPNSGNTGYAQKFQGRVTMTRDTSISTAYMELSSLRSQDTAVYYCARGGDYVWGSYRPYYYYYGMDVWGQGTTVTVSS

SEQ ID NO: 300 - protein, 121 aa, synthetic construct
QVQLVESGGGVVQPGRSLRLSCAASGFTFSSYGIHWVRQAPGKGLEWVAVIWYDASNKFHADAVKGRFTISRDNSKNTLYLQMNSLRAEDSAMYFCARGKVAGMPEAFEIWGQGTKVTVSS

SEQ ID NO: 301 - protein, 121 aa, synthetic construct
QVQLVESGGGVVQPGRSLRLSCTASGFTFSSYGIHWVRQAPGKGLEWVAVIWYDASNKFHADAVKGRFTISRDNSKNTLYLQMNSLRAEDSAMYFCARGKVAGMPEAFEIWGQGTKVTVSS

SEQ ID NO: 302 - protein, 121 aa, synthetic construct; identical to SEQ ID NO: 300

SEQ ID NO: 303 - protein, 121 aa, synthetic construct
QVQLVESGGGVVQPGRSLRLSCAASGFTFSSYGIHWVRQAPGKGLEWVAVIWYDASNKFHADAVKGRFTISRDNSKNTLYLQMNSLRAEDSAMYFCARGKVAGMPEAFEIWGQGTLVTVSS

SEQ ID NO: 304 - protein, 121 aa, synthetic construct
QVQLVESGGGVVQPGRSLRLSCAASGFTFSSYGIHWVRQAPGKGLEWVAVIWYDASNKFHADSVKGRFTISRDNSKNTLYLQMNSLRAEDSAMYFCARGKVAGMPEAFEIWGQGTKVTVSS

SEQ ID NO: 305 - protein, 121 aa, synthetic construct
QVQLVESGGGVVQPGRSLRLSCAASGFTFSSYGIHWVRQAPGKGLEWVAVIWYDGSNKFHADAVKGRFTISRDNSKNTLYLQMNSLRAEDSAMYFCARGKVAGMPEAFEIWGQGTKVTVSS

SEQ ID NO: 306 - protein, 129 aa, synthetic construct
QMQLVQSGAEVKKPGASVKVSCKASGYTFTSYDINWVRQATGQGLEWMGWMNPNSGGTGYAQKFQGRVTMTRDTSISTAYMELSSLRSQDTAVYYCARGGDYVWGSYRPYYYYYGMDVWGQGTTVTVSS

SEQ ID NO: 307 - protein, 129 aa, synthetic construct; identical to SEQ ID NO: 299

SEQ ID NO: 308 - protein, 129 aa, synthetic construct; identical to SEQ ID NO: 306

SEQ ID NO: 309 - protein, 129 aa, synthetic construct
QMQLVQSGAEVKKPGASVKVSCKASGYTFTSYDINWVRQAPGQGLEWMGWMNPNSGGTGYAQKFQGRVTMTRDTSISTAYMELSSLRSDDTAVYYCARGGDYVWGSYRPYYYYYGMDVWGQGTTVTVSS

SEQ ID NO: 310 - protein, 129 aa, synthetic construct; identical to SEQ ID NO: 306

SEQ ID NO: 311 - protein, 129 aa, synthetic construct
QMQLVQSGAEVKKPGASVKVSCKASGYTFTSYDINWVRQAPGQGLEWMGWMNPNSGNTGYAQKFQGRVTMTRDTSISTAYMELSSLRSDDTAVYYCARGGDYVWGSYRPYYYYYGMDVWGQGTTVTVSS

SEQ ID NO: 312 - protein, 129 aa, synthetic construct
QMQLVQSGAEVKKPGASVKVSCKASGYTFTSYDINWVRQATGQGLEWMGWMNPNSGGTGYAQKFQGRVTMTRDTSISTAYMELSSLRSQDTAVYYCARGGDYVFGSYRPYYYYYGMDVWGQGTTVTVSS

SEQ ID NO: 313 - protein, 129 aa, synthetic construct
QMQLVQSGAEVKKPGASVKVSCKASGYTFTSYDINWVRQAPGQGLEWMGWMNPNSGGTGYAQKFQGRVTMTRDTSISTAYMELSSLRSDDTAVYYCARGGDYVFGSYRPYYYYYGMDVWGQGTTVTVSS

SEQ ID NO: 314 - protein, 121 aa, synthetic construct; identical to SEQ ID NO: 303

SEQ ID NO: 315 - protein, 216 aa, synthetic construct
QSVLTQPPSASGTPGQRVTISCSGSSSNIGSNTVNWYQHLPGTAPKLLIYTNNQRPSGVPDRFSGSKSGTSASLAISGLQSEDEADYFCATFDDSLNGPVFGGGTKLTVLGQPKAAPSVTLFPPSSEELQANKATLVCLISDFYPGAVTVAWKADSSPVKAGVETTTPSKQSNNKYAASSYLSLTPEQWKSHRSYSCQVTHEGSTVEKTVAPTECS

SEQ ID NO: 316 - protein, 214 aa, synthetic construct
DIQMTQSPSSLSASIGDRVTITCRASQDIRDYLGWYQQKPGKAPKRLIYGASSLQSGVPSRFSGSGSGTEFTLTISSLQPEDFATYYCLQHNNYPFTFGPGTKVDIKRTVAAPSVFIFPPSDEQLKSGTASVVCLLNNFYPREAKVQWKVDNALQSGNSQESVTEQDSKDSTYSLSSTLTLSKADYEKHKVYACEVTHQGLSSPVTKSFNRGEC

SEQ ID NO: 317 - protein, 214 aa, synthetic construct; identical to SEQ ID NO: 316

SEQ ID NO: 318 - protein, 213 aa, synthetic construct
DIQMTQSPSSLSASVGDRVTITCQASQDISNYLNWYQQKPGKAPKLLIYDASNLETGVPSRFSGSGSGTDFSFTISSLQPEDIATYYCQQYDILLTFGGGTKVEIKRTVAAPSVFIFPPSDEQLKSGTASVVCLLNNFYPREAKVQWKVDNALQSGNSQESVTEQDSKDSTYSLSSTLTLSKADYEKHKVYACEVTHQGLSSPVTKSFNRGEC

SEQ ID NO: 319 - protein, 220 aa, synthetic construct
DIVMTQSPDSLAVSLGERATINCKSSQSVLSSSNNKNYIAWYQQQPGHPPKLLIYWASTRESGVPDRFSGSGSGTDFTLTISSLQAEDVAVFYCQQYYSTPWTFGQGTKVEIKRTVAAPSVFIFPPSDEQLKSGTASVVCLLNNFYPREAKVQWKVDNALQSGNSQESVTEQDSKDSTYSLSSTLTLSKADYEKHKVYACEVTHQGLSSPVTKSFNRGEC

SEQ ID NO: 320 - protein, 220 aa, synthetic construct
DIVMTQSPDSLAVSLGERATINCKSSQSVLSSSNNKNYIAWYQQKPGHPPKLLIYWASTRESGVPDRFSGSGSGTDFTLTISSLQAEDVAVFYCQQYYSTPWTFGQGTKVEIKRTVAAPSVFIFPPSDEQLKSGTASVVCLLNNFYPREAKVQWKVDNALQSGNSQESVTEQDSKDSTYSLSSTLTLSKADYEKHKVYACEVTHQGLSSPVTKSFNRGEC

SEQ ID NO: 321 - protein, 220 aa, synthetic construct
DIVMTQSPDSLSVSLGERATINCKSSQSVLSSSNNKNYLAWYQQKPGQPPNLLIYWTSTRDSGVPDRFSGSGSGTDFTLTINSLQAEDVAVYYCQQYYRTPWTFGQGTKVEIKRTVAAPSVFIFPPSDEQLKSGTASVVCLLNNFYPREAKVQWKVDNALQSGNSQESVTEQDSKDSTYSLSSTLTLSKADYEKHKVYACEVTHQGLSSPVTKSFNRGEC

SEQ ID NO: 322 - protein, 220 aa, synthetic construct; identical to SEQ ID NO: 321

SEQ ID NO: 323 - protein, 215 aa, synthetic construct
EIVLTQSPGTLSLSPGERATLSCRASQSISYSYLAWYQQKPGQAPRLLIYGASSRATGIPDRFSGSGSGTDFTLTISRQEPDDFAVYYCQQYGSSPLTFGGGTKVEIKRTVAAPSVFIFPPSDEQLKSGTASVVCLLNNFYPREAKVQWKVDNALQSGNSQESVTEQDSKDSTYSLSSTLTLSKADYEKHKVYACEVTHQGLSSPVTKSFNRGEC

SEQ ID NO: 324 - protein, 214 aa, synthetic construct
EIVMTQSPATLSVSPGERATLSCRASQSVSSNLAWYQQKPGQAPRLLIYGAATRATGIPARVSGSGSGTEFTLTISSLQSEDFAVYYCQQYNNWPLTFGGGTKVEIKRTVAAPSVFIFPPSDEQLKSGTASVVCLLNNFYPREAKVQWKVDNALQSGNSQESVTEQDSKDSTYSLSSTLTLSKADYEKHKVYACEVTHQGLSSPVTKSFNRGEC

SEQ ID NO: 325 - protein, 214 aa, synthetic construct
DIQMTQSPSSLSASVGDRVTITCRASQGIRNELGWYQQKPGKAPKRLIYGASSLQSGVPSRFSGSGSGTEFTLTISSLQPEDFVTYYCLQHNSYPFTFGPGTKVDVKRTVAAPSVFIFPPSDEQLKSGTASVVCLLNNFYPREAKVQWKVDNALQSGNSQESVTEQDSKDSTYSLSSTLTLSKADYEKHKVYACEVTHQGLSSPVTKSFNRGEC

SEQ ID NO: 326 - protein, 213 aa, synthetic construct
DIQMTQSPSSLSASVGDRVTITCQASQDITNYLNWYQQKPGKAPKLLIYDASNLEPGVPSRFSGSGSGTDFTFTISSLQPEDIATYYCQQYDDLFTFGPGTKVDIKRTVAAPSVFIFPPSDEQLKSGTASVVCLLNNFYPREAKVQWKVDNALQSGNSQESVTEQDSKDSTYSLSSTLTLSKADYEKHKVYACEVTHQGLSSPVTKSFNRGEC

SEQ ID NO: 327 - protein, 214 aa, synthetic construct
DIQMTQSPSSVSASVGDRVTITCRASQGLIIWLAWYQQKPGKAPKLLIYAASSLQSGVPSRFSGSGSGTDFTLTISSLQPEDFATYYCQQTNSFPPTFGQGTKVEIKRTVAAPSVFIFPPSDEQLKSGTASVVCLLNNFYPREAKVQWKVDNALQSGNSQESVTEQDSKDSTYSLSSTLTLSKADYEKHKVYACEVTHQGLSSPVTKSFNRGEC

SEQ ID NO: 328 - protein, 214 aa, synthetic construct; identical to SEQ ID NO: 327

SEQ ID NO: 329 - protein, 214 aa, synthetic construct
DIQMTQSPSSLSASVGDRVTITCRASQGIRNELGWYQQKPGKAPKLLIYGASSLQSGVPSRFSGSGSGTEFTLTISSLQPEDFVTYYCLQHNSYPFTFGQGTKVDVKRTVAAPSVFIFPPSDEQLKSGTASVVCLLNNFYPREAKVQWKVDNALQSGNSQESVTEQDSKDSTYSLSSTLTLSKADYEKHKVYACEVTHQGLSSPVTKSFNRGEC

SEQ ID NO: 330 - protein, 214 aa, synthetic construct; identical to SEQ ID NO: 329

SEQ ID NO: 331 - protein, 214 aa, synthetic construct; identical to SEQ ID NO: 329

SEQ ID NO: 332 - protein, 214 aa, synthetic construct
DIQMTQSPSSLSASVGDRVTITCRASQGIRNELGWYQQKPGKAPKLLIYGASSLQSGVPSRFSGSGSGTEFTLTISSLQPEDFVTYYCLQHNSYPFTFGPGTKVDVKRTVAAPSVFIFPPSDEQLKSGTASVVCLLNNFYPREAKVQWKVDNALQSGNSQESVTEQDSKDSTYSLSSTLTLSKADYEKHKVYACEVTHQGLSSPVTKSFNRGEC

SEQ ID NO: 333 - protein, 214 aa, synthetic construct
DIQMTQSPSSLSASVGDRVTITCRASQGIRNELGWYQQKPGKAPKRLIYGASSLQSGVPSRFSGSGSGTEFTLTISSLQPEDFVTYYCLQHNSYPFTFGQGTKVDVKRTVAAPSVFIFPPSDEQLKSGTASVVCLLNNFYPREAKVQWKVDNALQSGNSQESVTEQDSKDSTYSLSSTLTLSKADYEKHKVYACEVTHQGLSSPVTKSFNRGEC

SEQ ID NO: 334 - protein, 214 aa, synthetic construct; identical to SEQ ID NO: 329

SEQ ID NO: 335 - protein, 214 aa, synthetic construct
DIQMTQSPSSLSASIGDRVTITCRASQDIRDYLGWYQQKPGKAPKLLIYGASSLQSGVPSRFSGSGSGTEFTLTISSLQPEDFATYYCLQHNNYPFTFGQGTKVDIKRTVAAPSVFIFPPSDEQLKSGTASVVCLLNNFYPREAKVQWKVDNALQSGNSQESVTEQDSKDSTYSLSSTLTLSKADYEKHKVYACEVTHQGLSSPVTKSFNRGEC

SEQ ID NO: 336 - protein, 214 aa, synthetic construct
DIQMTQSPSSLSASIGDRVTITCRASQDIRDYLGWYQQKPGKAPKRLIYGASSLQSGVPSRFSGSGSGTEFTLTISSLQPEDFATYYCLQHNNYPFTFGQGTKVDIKRTVAAPSVFIFPPSDEQLKSGTASVVCLLNNFYPREAKVQWKVDNALQSGNSQESVTEQDSKDSTYSLSSTLTLSKADYEKHKVYACEVTHQGLSSPVTKSFNRGEC

SEQ ID NO: 337 - protein, 214 aa, synthetic construct
DIQMTQSPSSLSASIGDRVTITCRASQDIRDYLGWYQQKPGKAPKLLIYGASSLQSGVPSRFSGSGSGTEFTLTISSLQPEDFATYYCLQHNNYPFTFGPGTKVDIKRTVAAPSVFIFPPSDEQLKSGTASVVCLLNNFYPREAKVQWKVDNALQSGNSQESVTEQDSKDSTYSLSSTLTLSKADYEKHKVYACEVTHQGLSSPVTKSFNRGEC

SEQ ID NO: 338 - protein, 214 aa, synthetic construct; identical to SEQ ID NO: 335

SEQ ID NO: 339 - protein, 214 aa, synthetic construct; identical to SEQ ID NO: 335

SEQ ID NO: 340 - protein, 214 aa, synthetic construct; identical to SEQ ID NO: 335

SEQ ID NO: 341 - protein, 214 aa, synthetic construct; identical to SEQ ID NO: 335

SEQ ID NO: 342 - protein, 214 aa, synthetic construct
DIQMTQSPSSLSASIGDRVTITCRASQDLRNYLGWYHQKPGKAPKRLIYGASSLQSGVPSRFSGSGSGTEFTLTISSLQPEDFATYYCLQHNNYPFTFGPGTKVDIKRTVAAPSVFIFPPSDEQLKSGTASVVCLLNNFYPREAKVQWKVDNALQSGNSQESVTEQDSKDSTYSLSSTLTLSKADYEKHKVYACEVTHQGLSSPVTKSFNRGEC

SEQ ID NO: 343 - protein, 214 aa, synthetic construct
DIQMTQSPSSLSASIGDRVTITCRASQDLRNYLGWYQQKPGKAPKLLIYGASSLQSGVPSRFSGSGSGTEFTLTISSLQPEDFATYYCLQHNNYPFTFGPGTKVDIKRTVAAPSVFIFPPSDEQLKSGTASVVCLLNNFYPREAKVQWKVDNALQSGNSQESVTEQDSKDSTYSLSSTLTLSKADYEKHKVYACEVTHQGLSSPVTKSFNRGEC

SEQ ID NO: 344 - protein, 214 aa, synthetic construct; identical to SEQ ID NO: 343

SEQ ID NO: 345 - protein, 214 aa, synthetic construct
DIQMTQSPSSLSASIGDRVTITCRASQDLRNYLGWYHQKPGKAPKLLIYGASSLQSGVPSRFSGSGSGTEFTLTISSLQPEDFATYYCLQHNNYPFTFGPGTKVDIKRTVAAPSVFIFPPSDEQLKSGTASVVCLLNNFYPREAKVQWKVDNALQSGNSQESVTEQDSKDSTYSLSSTLTLSKADYEKHKVYACEVTHQGLSSPVTKSFNRGEC

SEQ ID NO: 346 - protein, 214 aa, synthetic construct
DIQMTQSPSSLSASIGDRVTITCRASQDLRNYLGWYQQKPGKAPKRLIYGASSLQSGVPSRFSGSGSGTEFTLTISSLQPEDFATYYCLQHNNYPFTFGPGTKVDIKRTVAAPSVFIFPPSDEQLKSGTASVVCLLNNFYPREAKVQWKVDNALQSGNSQESVTEQDSKDSTYSLSSTLTLSKADYEKHKVYACEVTHQGLSSPVTKSFNRGEC

SEQ ID NO: 347 - protein, 214 aa, synthetic construct; identical to SEQ ID NO: 346

SEQ ID NO: 348 - protein, 214 aa, synthetic construct; identical to SEQ ID NO: 345

SEQ ID NO: 349 - protein, 214 aa, synthetic construct; identical to SEQ ID NO: 342

SEQ ID NO: 350 - protein, 214 aa, synthetic construct; identical to SEQ ID NO: 343

SEQ ID NO: 351 - protein, 214 aa, synthetic construct; identical to SEQ ID NO: 343

SEQ ID NO: 352 - protein, 214 aa, synthetic construct
DIQMTQSPSSLSASIGDRVTITCRASQDLRNYLGWYQQKPGKAPKLLIYGASSLQSGVPSRFSGSGSGTEFTLTISSLQPEDFATYYCLQHNNYPFTFGQGTKVDIKRTVAAPSVFIFPPSDEQLKSGTASVVCLLNNFYPREAKVQWKVDNALQSGNSQESVTEQDSKDSTYSLSSTLTLSKADYEKHKVYACEVTHQGLSSPVTKSFNRGEC

SEQ ID NO: 353 - protein, 214 aa, synthetic construct; identical to SEQ ID NO: 343

SEQ ID NO: 354 - protein, 213 aa, synthetic construct
DIQMTQSPSSLSASVGDRVTITCQASQDISNYLNWYQQKPGKAPKLLIYDASNLETGVPSRFSGSGSGTDFSLTISSLQPEDFATYYCQQYDILLTFGGGTKVEIKRTVAAPSVFIFPPSDEQLKSGTASVVCLLNNFYPREAKVQWKVDNALQSGNSQESVTEQDSKDSTYSLSSTLTLSKADYEKHKVYACEVTHQGLSSPVTKSFNRGEC

SEQ ID NO: 355 - protein, 213 aa, synthetic construct; identical to SEQ ID NO: 354

SEQ ID NO: 356 - protein, 213 aa, synthetic construct
DIQMTQSPSSLSASVGDRVTITCQASQDISNYLNWYQQKPGKAPKLLIYDASNLETGVPSRFSGSGSGTDFSLTISSLQPEDIATYYCQQYDILLTFGGGTKVEIKRTVAAPSVFIFPPSDEQLKSGTASVVCLLNNFYPREAKVQWKVDNALQSGNSQESVTEQDSKDSTYSLSSTLTLSKADYEKHKVYACEVTHQGLSSPVTKSFNRGEC

SEQ ID NO: 357 - protein, 213 aa, synthetic construct
DIQMTQSPSSLSASVGDRVTITCQASQDISNYLNWYQQKPGKAPKLLIYDASNLETGVPSRFSGSGSGTDFSFTISSLQPEDFATYYCQQYDILLTFGGGTKVEIKRTVAAPSVFIFPPSDEQLKSGTASVVCLLNNFYPREAKVQWKVDNALQSGNSQESVTEQDSKDSTYSLSSTLTLSKADYEKHKVYACEVTHQGLSSPVTKSFNRGEC

SEQ ID NO: 358 - protein, 213 aa, synthetic construct; identical to SEQ ID NO: 356

SEQ ID NO: 359 - protein, 213 aa, synthetic construct; identical to SEQ ID NO: 357

SEQ ID NO: 360 - protein, 213 aa, synthetic construct; identical to SEQ ID NO: 318

SEQ ID NO: 361 - protein, 213 aa, synthetic construct; identical to SEQ ID NO: 354

SEQ ID NO: 362 - protein, 213 aa, synthetic construct; identical to SEQ ID NO: 354

SEQ ID NO: 363 - protein, 214 aa, synthetic construct; identical to SEQ ID NO: 316

SEQ ID NO: 364 - protein, 214 aa, synthetic construct; identical to SEQ ID NO: 316

SEQ ID NO: 365 - protein, 214 aa, synthetic construct; identical to SEQ ID NO: 335

SEQ ID NO: 366 - protein, 214 aa, synthetic construct; identical to SEQ ID NO: 335

SEQ ID NO: 367 - protein, 214 aa, synthetic construct; identical to SEQ ID NO: 337

SEQ ID NO: 368 - protein, 214 aa, synthetic construct; identical to SEQ ID NO: 337

SEQ ID NO: 369 - protein, 214 aa, synthetic construct; identical to SEQ ID NO: 337

SEQ ID NO: 370 - protein, 213 aa, synthetic construct
DIQMTQSPSSLSASVGDRVTITCQASQDITNYLNWYQQKPGKAPKLLIYDASNLEPGVPSRFSGSGSGTDFTLTISSLQPEDFATYYCQQYDDLFTFGPGTKVDIKRTVAAPSVFIFPPSDEQLKSGTASVVCLLNNFYPREAKVQWKVDNALQSGNSQESVTEQDSKDSTYSLSSTLTLSKADYEKHKVYACEVTHQGLSSPVTKSFNRGEC

SEQ ID NO: 371 - protein, 213 aa, synthetic construct
DIQMTQSPSSLSASVGDRVTITCQASQDITNYLNWYQQKPGKAPKLLIYDASNLEPGVPSRFSGSGSGTDFTLTISSLQPEDIATYYCQQYDDLFTFGPGTKVDIKRTVAAPSVFIFPPSDEQLKSGTASVVCLLNNFYPREAKVQWKVDNALQSGNSQESVTEQDSKDSTYSLSSTLTLSKADYEKHKVYACEVTHQGLSSPVTKSFNRGEC

SEQ ID NO: 372 - protein, 213 aa, synthetic construct; identical to SEQ ID NO: 370

SEQ ID NO: 373 - protein, 213 aa, synthetic construct
DIQMTQSPSSLSASVGDRVTITCQASQDITNYLNWYQQKPGKAPKLLIYDASNLEPGVPSRFSGSGSGTDFTFTISSLQPEDFATYYCQQYDDLFTFGPGTKVDIKRTVAAPSVFIFPPSDEQLKSGTASVVCLLNNFYPREAKVQWKVDNALQSGNSQESVTEQDSKDSTYSLSSTLTLSKADYEKHKVYACEVTHQGLSSPVTKSFNRGEC

SEQ ID NO: 374 - protein, 213 aa, synthetic construct; identical to SEQ ID NO: 371

SEQ ID NO: 375 - protein, 213 aa, synthetic construct; identical to SEQ ID NO: 373

SEQ ID NO: 376 - protein, 213 aa, synthetic construct; identical to SEQ ID NO: 326

SEQ ID NO: 377 - protein, 213 aa, synthetic construct; identical to SEQ ID NO: 370

SEQ ID NO: 378 - protein, 213 aa, synthetic construct; identical to SEQ ID NO: 370

SEQ ID NO: 379 - protein, 213 aa, synthetic construct
DIQMTQSPSSLSASVGDRVTITCQASQDITNYLNWYQQKPGKAPKLLIYDASNLEPGVPSRFSGSGSGTDFTLTISSLQPEDFATYYCQQYDDLFTFGQGTKVDIKRTVAAPSVFIFPPSDEQLKSGTASVVCLLNNFYPREAKVQWKVDNALQSGNSQESVTEQDSKDSTYSLSSTLTLSKADYEKHKVYACEVTHQGLSSPVTKSFNRGEC

SEQ ID NO: 380 - protein, 213 aa, synthetic construct; identical to SEQ ID NO: 379

SEQ ID NO: 381 - protein, 214 aa, synthetic construct
EIVLTQSPGTLSLSPGERATLSCRASQIFTSTYLAWYQQKPGQAPRLLIYGASSRATGIPDRFSGSGSGTDFTLTISRLEPEDFAVYYCQQYGSSPRFGQGTRLEIKRTVAAPSVFIFPPSDEQLKSGTASVVCLLNNFYPREAKVQWKVDNALQSGNSQESVTEQDSKDSTYSLSSTLTLSKADYEKHKVYACEVTHQGLSSPVTKSFNRGEC

SEQ ID NO: 382 - protein, 214 aa, synthetic construct; identical to SEQ ID NO: 381

SEQ ID NO: 383 - protein, 214 aa, synthetic construct; identical to SEQ ID NO: 381

SEQ ID NO: 384 - protein, 214 aa, synthetic construct; identical to SEQ ID NO: 381

SEQ ID NO: 385 - protein, 214 aa, synthetic construct
EIVMTQSPATLSVSPGERATLSCRASQSVSSNLAWYQQKPGQAPRLLIYGAATRATGIPARFSGSGSGTEFTLTISSLQSEDFAVYYCQQYNNWPLTFGGGTKVEIKRTVAAPSVFIFPPSDEQLKSGTASVVCLLNNFYPREAKVQWKVDNALQSGNSQESVTEQDSKDSTYSLSSTLTLSKADYEKHKVYACEVTHQGLSSPVTKSFNRGEC

SEQ ID NO: 386 - protein, 214 aa, synthetic construct; identical to SEQ ID NO: 385

SEQ ID NO: 387 - protein, 214 aa, synthetic construct; identical to SEQ ID NO: 385

SEQ ID NO: 388 - protein, 214 aa, synthetic construct; identical to SEQ ID NO: 324

SEQ ID NO: 389 - protein, 214 aa, synthetic construct
EIVMTQSPATLSVSPGERATLSCRASQSVSSNLAWYQQKPGQAPRLLIYGAATRATGIPARFSGSGSGTEFTLTISSLEPEDFAVYYCQQYNNFPLTFGGGTKVEIKRTVAAPSVFIFPPSDEQLKSGTASVVCLLNNFYPREAKVQWKVDNALQSGNSQESVTEQDSKDSTYSLSSTLTLSKADYEKHKVYACEVTHQGLSSPVTKSFNRGEC

SEQ ID NO: 390 - protein, 214 aa, synthetic construct
EIVMTQSPATLSVSPGERATLSCRASQSVSSNLAWYQQKPGQAPRLLIYGAATRATGIPARFSGSGSGTEFTLTISSLEPEDFAVYYCQQYNNYPLTFGGGTKVEIKRTVAAPSVFIFPPSDEQLKSGTASVVCLLNNFYPREAKVQWKVDNALQSGNSQESVTEQDSKDSTYSLSSTLTLSKADYEKHKVYACEVTHQGLSSPVTKSFNRGEC

SEQ ID NO: 391 - protein, 214 aa, synthetic construct
EIVMTQSPATLSVSPGERATLSCRASQSVSSNLAWYQQKPGQAPRLLIYGAATRATGIPARFSGSGSGTEFTLTISSLEPEDFAVYYCQQYNNWPLTFGGGTKVEIKRTVAAPSVFIFPPSDEQLKSGTASVVCLLNNFYPREAKVQWKVDNALQSGNSQESVTEQDSKDSTYSLSSTLTLSKADYEKHKVYACEVTHQGLSSPVTKSFNRGEC

SEQ ID NO: 392 - protein, 214 aa, synthetic construct; identical to SEQ ID NO: 391

SEQ ID NO: 393 - protein, 215 aa, synthetic construct
EIVLTQSPGTLSLSPGERATLSCRASQSISYSYLAWYQQKPGQAPRLLIYGASSRATGIPDRFSGSGSGTDFTLTISRLEPDDFAVYYCQQYGSSPLTFGGGTKVEIKRTVAAPSVFIFPPSDEQLKSGTASVVCLLNNFYPREAKVQWKVDNALQSGNSQESVTEQDSKDSTYSLSSTLTLSKADYEKHKVYACEVTHQGLSSPVTKSFNRGEC

SEQ ID NO: 394 - protein, 215 aa, synthetic construct; identical to SEQ ID NO: 323

SEQ ID NO: 395 - protein, 215 aa, synthetic construct; identical to SEQ ID NO: 393

SEQ ID NO: 396 - protein, 215 aa, synthetic construct; identical to SEQ ID NO: 393

SEQ ID NO: 397 - protein, 215 aa, synthetic construct; identical to SEQ ID NO: 393

SEQ ID NO: 398 - protein, 215 aa, synthetic construct; identical to SEQ ID NO: 323

SEQ ID NO: 399 - protein, 215 aa, synthetic construct; identical to SEQ ID NO: 323

SEQ ID NO: 400 - protein, 220 aa, synthetic construct; identical to SEQ ID NO: 319

SEQ ID NO: 401 - protein, 220 aa, synthetic construct; identical to SEQ ID NO: 319

SEQ ID NO: 402 - protein, 220 aa, synthetic construct; identical to SEQ ID NO: 319

SEQ ID NO: 403 - protein, 220 aa, synthetic construct; identical to SEQ ID NO: 319

SEQ ID NO: 404 - protein, 220 aa, synthetic construct; identical to SEQ ID NO: 319

SEQ ID NO: 405 - protein, 220 aa, synthetic construct; identical to SEQ ID NO: 319

SEQ ID NO: 406 - protein, 220 aa, synthetic construct; identical to SEQ ID NO: 319

SEQ ID NO: 407 - protein, 220 aa, synthetic construct; identical to SEQ ID NO: 319

SEQ ID NO: 408 - protein, 220 aa, synthetic construct; identical to SEQ ID NO: 319

SEQ ID NO: 409 - protein, 220 aa, synthetic construct
DIVMTQSPDSLAVSLGERATINCKSSQSVLSSSNNKNYIAWYQQKPGQPPKLLIYWASTRESGVPDRFSGSGSGTDFTLTISSLQAEDVAVFYCQQYYSTPWTFGQGTKVEIKRTVAAPSVFIFPPSDEQLKSGTASVVCLLNNFYPREAKVQWKVDNALQSGNSQESVTEQDSKDSTYSLSSTLTLSKADYEKHKVYACEVTHQGLSSPVTKSFNRGEC

SEQ ID NO: 410 - protein, 220 aa, synthetic construct; identical to SEQ ID NO: 409

SEQ ID NO: 411 - protein, 220 aa, synthetic construct
DIVMTQSPDSLSVSLGERATINCKSSQSVLSSSNNKNYLAWYQQKPGQPPNLLIYWTSTRESGVPDRFSGSGSGTDFTLTINSLQAEDVAVYYCQQYYRTPWTFGQGTKVEIKRTVAAPSVFIFPPSDEQLKSGTASVVCLLNNFYPREAKVQWKVDNALQSGNSQESVTEQDSKDSTYSLSSTLTLSKADYEKHKVYACEVTHQGLSSPVTKSFNRGEC

SEQ ID NO: 412 - protein, 220 aa, synthetic construct; identical to SEQ ID NO: 411

SEQ ID NO: 413 - protein, 220 aa, synthetic construct; identical to SEQ ID NO: 321

SEQ ID NO: 414 - protein, 220 aa, synthetic construct; identical to SEQ ID NO: 411

SEQ ID NO: 415 - protein, 220 aa, synthetic construct; identical to SEQ ID NO: 411

SEQ ID NO: 416 - protein, 220 aa, synthetic construct; identical to SEQ ID NO: 321

SEQ ID NO: 417 - protein, 220 aa, synthetic construct; identical to SEQ ID NO: 321

SEQ ID NO: 418 - protein, 220 aa, synthetic construct
DIVMTQSPDSLAVSLGERATINCKSSQSVLSSSNNKNYLAWYQQKPGQPPKLLIYWTSTRESGVPDRFSGSGSGTDFTLTINSLQAEDVAVYYCQQYYRTPWTFGQGTKVEIKRTVAAPSVFIFPPSDEQLKSGTASVVCLLNNFYPREAKVQWKVDNALQSGNSQESVTEQDSKDSTYSLSSTLTLSKADYEKHKVYACEVTHQGLSSPVTKSFNRGEC

SEQ ID NO: 419 - protein, 220 aa, synthetic construct; identical to SEQ ID NO: 411

SEQ ID NO: 420 - protein, 220 aa, synthetic construct; identical to SEQ ID NO: 320

SEQ ID NO: 421 - protein, 220 aa, synthetic construct; identical to SEQ ID NO: 320

SEQ ID NO: 422 - protein, 220 aa, synthetic construct; identical to SEQ ID NO: 320

SEQ ID NO: 423 - protein, 220 aa, synthetic construct; identical to SEQ ID NO: 409

SEQ ID NO: 424 - protein, 220 aa, synthetic construct; identical to SEQ ID NO: 409

SEQ ID NO: 425 - protein, 220 aa, synthetic construct; identical to SEQ ID NO: 321

SEQ ID NO: 426 - protein, 220 aa, synthetic construct; identical to SEQ ID NO: 321

SEQ ID NO: 427 - protein, 220 aa, synthetic construct; identical to SEQ ID NO: 321

SEQ ID NO: 428 - protein, 220 aa, synthetic construct; identical to SEQ ID NO: 321

SEQ ID NO: 429 - protein, 220 aa, synthetic construct; identical to SEQ ID NO: 321

SEQ ID NO: 430 - protein, 220 aa, synthetic construct; identical to SEQ ID NO: 321

SEQ ID NO: 431 - protein, 220 aa, synthetic construct; identical to SEQ ID NO: 321

SEQ ID NO: 432 - protein, 220 aa, synthetic construct; identical to SEQ ID NO: 411

SEQ ID NO: 433 - protein, 220 aa, synthetic construct; identical to SEQ ID NO: 411

SEQ ID NO: 434 - protein, 220 aa, synthetic construct; identical to SEQ ID NO: 411

SEQ ID NO: 435 - protein, 220 aa, synthetic construct; identical to SEQ ID NO: 411

SEQ ID NO: 436 - protein, 220 aa, synthetic construct
DIVMTQSPDSLAVSLGERATINCKSSQSVLSSSNNKNYLAWYQQKPGQPPKLLIYWTSTRDSGVPDRFSGSGSGTDFTLTINSLQAEDVAVYYCQQYYRTPWTFGQGTKVEIKRTVAAPSVFIFPPSDEQLKSGTASVVCLLNNFYPREAKVQWKVDNALQSGNSQESVTEQDSKDSTYSLSSTLTLSKADYEKHKVYACEVTHQGLSSPVTKSFNRGEC

SEQ ID NO: 437 - protein, 220 aa, synthetic construct; identical to SEQ ID NO: 418

SEQ ID NO: 438 - protein, 216 aa, synthetic construct
QSVLTQPPSASGTPGQRVTISCSGSSSNIGSQTVNWYQHLPGTAPKLLIYTNNQRPSGVPDRFSGSKSGTSASLAISGLQSEDEADYFCATFDESLSGPVFGGGTKLTVLGQPKAAPSVTLFPPSSEELQANKATLVCLISDFYPGAVTVAWKADSSPVKAGVETTTPSKQSNNKYAASSYLSLTPEQWKSHRSYSCQVTHEGSTVEKTVAPTECS

SEQ ID NO: 439 - protein, 216 aa, synthetic construct
QSVLTQPPSASGTPGQRVTISCSGSSSNIGSQTVNWYQHLPGTAPKLLIYTNNQRPSGVPDRFSGSKSGTSASLAISGLQSEDEADYFCATFDESLQGPVFGGGTKLTVLGQPKAAPSVTLFPPSSEELQANKATLVCLISDFYPGAVTVAWKADSSPVKAGVETTTPSKQSNNKYAASSYLSLTPEQWKSHRSYSCQVTHEGSTVEKTVAPTECS

SEQ ID NO: 440 - protein, 216 aa, synthetic construct
QSVLTQPPSASGTPGQRVTISCSGSSSNIGSNYVNWYQHLPGTAPKLLIYTNNQRPSGVPDRFSGSKSGTSASLAISGLQSEDEADYFCATFDESLSGPVFGGGTKLTVLGQPKAAPSVTLFPPSSEELQANKATLVCLISDFYPGAVTVAWKADSSPVKAGVETTTPSKQSNNKYAASSYLSLTPEQWKSHRSYSCQVTHEGSTVEKTVAPTECS

SEQ ID NO: 441 - protein, 216 aa, synthetic construct
QSVLTQPPSASGTPGQRVTISCSGSSSNIGSNYVNWYQHLPGTAPKLLIYTNNQRPSGVPDRFSGSKSGTSASLAISGLQSEDEADYFCATFDESLQGPVFGGGTKLTVLGQPKAAPSVTLFPPSSEELQANKATLVCLISDFYPGAVTVAWKADSSPVKAGVETTTPSKQSNNKYAASSYLSLTPEQWKSHRSYSCQVTHEGSTVEKTVAPTECS

SEQ ID NO: 442 - protein, 216 aa, synthetic construct
QSVLTQPPSASGTPGQRVTISCSGSSSNIGSQTVNWYQHLPGTAPKLLIYTNNQRPSGVPDRFSGSKSGTSASLAISGLQSEDEADYFCATFDDSLNGPVFGGGTKLTVLGQPKAAPSVTLFPPSSEELQANKATLVCLISDFYPGAVTVAWKADSSPVKAGVETTTPSKQSNNKYAASSYLSLTPEQWKSHRSYSCQVTHEGSTVEKTVAPTECS

SEQ ID NO: 443 - protein, 216 aa, synthetic construct
QSVLTQPPSASGTPGQRVTISCSGSSSNIGSNYVNWYQHLPGTAPKLLIYTNNQRPSGVPDRFSGSKSGTSASLAISGLQSEDEADYFCATFDDSLNGPVFGGGTKLTVLGQPKAAPSVTLFPPSSEELQANKATLVCLISDFYPGAVTVAWKADSSPVKAGVETTTPSKQSNNKYAASSYLSLTPEQWKSHRSYSCQVTHEGSTVEKTVAPTECS

SEQ ID NO: 444 - protein, 216 aa, synthetic construct
QSVLTQPPSASGTPGQRVTISCSGSSSNIGSNTVNWYQHLPGTAPKLLIYTNNQRPSGVPDRFSGSKSGTSASLAISGLQSEDEADYFCATFDESLNGPVFGGGTKLTVLGQPKAAPSVTLFPPSSEELQANKATLVCLISDFYPGAVTVAWKADSSPVKAGVETTTPSKQSNNKYAASSYLSLTPEQWKSHRSYSCQVTHEGSTVEKTVAPTECS

SEQ ID NO: 445 - protein, 216 aa, synthetic construct
QSVLTQPPSASGTPGQRVTISCSGSSSNIGSNTVNWYQHLPGTAPKLLIYTNNQRPSGVPDRFSGSKSGTSASLAISGLQSEDEADYFCATFDDSLQGPVFGGGTKLTVLGQPKAAPSVTLFPPSSEELQANKATLVCLISDFYPGAVTVAWKADSSPVKAGVETTTPSKQSNNKYAASSYLSLTPEQWKSHRSYSCQVTHEGSTVEKTVAPTECS

SEQ ID NO: 446 - protein, 216 aa, synthetic construct
QSVLTQPPSASGTPGQRVTISCSGSSSNIGSNTVNWYQHLPGTAPKLLIYTNNQRPSGVPDRFSGSKSGTSASLAISGLQSEDEADYFCATFDDSLSGPVFGGGTKLTVLGQPKAAPSVTLFPPSSEELQANKATLVCLISDFYPGAVTVAWKADSSPVKAGVETTTPSKQSNNKYAASSYLSLTPEQWKSHRSYSCQVTHEGSTVEKTVAPTECS

SEQ ID NO: 447 - protein, 216 aa, synthetic construct
QSVLTQPPSASGTPGQRVTISCSGSSSNIGSNTVNWYQHLPGTAPKLLIYTNNQRPSGVPDRFSGSKSGTSASLAISGLQSEDEADYFCATFDDSLNAPVFGGGTKLTVLGQPKAAPSVTLFPPSSEELQANKATLVCLISDFYPGAVTVAWKADSSPVKAGVETTTPSKQSNNKYAASSYLSLTPEQWKSHRSYSCQVTHEGSTVEKTVAPTECS

SEQ ID NO: 448 - protein, 216 aa, synthetic construct
QSVLTQPPSASGTPGQRVTISCSGSSSNIGSNTVNWYQHLPGTAPKLLIYTNNQRPSGVPDRFSGSKSGTSASLAISGLQSEDEADYFCATFDSSLNGPVFGGGTKLTVLGQPKAAPSVTLFPPSSEELQANKATLVCLISDFYPGAVTVAWKADSSPVKAGVETTTPSKQSNNKYAASSYLSLTPEQWKSHRSYSCQVTHEGSTVEKTVAPTECS

SEQ ID NO: 449 - protein, 216 aa, synthetic construct
QSVLTQPPSASGTPGQRVTISCSGSSSNIGSNYVNWYQHLPGTAPKLLIYTNNQRPSGVPDRFSGSKSGTSASLAISGLQSEDEADYFCATFDSSLNAPVFGGGTKLTVLGQPKAAPSVTLFPPSSEELQANKATLVCLISDFYPGAVTVAWKADSSPVKAGVETTTPSKQSNNKYAASSYLSLTPEQWKSHRSYSCQVTHEGSTVEKTVAPTECS

SEQ ID NO: 450 - protein, 216 aa, synthetic construct; identical to SEQ ID NO: 449

SEQ ID NO: 451 - protein, 216 aa, synthetic construct; identical to SEQ ID NO: 438

SEQ ID NO: 452 - protein, 214 aa, synthetic construct
DIQMTQSPSSLSASIGDRVTITCRASQDLRNYLGWYQQKPGKAPKRLIYGASSLQSGVPSRFSGSGSGTEFTLTISSLQPEDFATYYCLQHNNYPFTFGQGTKVDIKRTVAAPSVFIFPPSDEQLKSGTASVVCLLNNFYPREAKVQWKVDNALQSGNSQESVTEQDSKDSTYSLSSTLTLSKADYEKHKVYACEVTHQGLSSPVTKSFNRGEC

SEQ ID NO: 453 - protein, 214 aa, synthetic construct; identical to SEQ ID NO: 336

SEQ ID NO: 454 - protein, 216 aa, synthetic construct
QSVLTQPPSASGTPGQRVTISCSGSSSNIGSNTVNWYQQLPGTAPKLLIYTNNQRPSGVPDRFSGSKSGTSASLAISGLQSEDEADYFCATFDSSLSGPVFGGGTKLTVLGQPKAAPSVTLFPPSSEELQANKATLVCLISDFYPGAVTVAWKADSSPVKAGVETTTPSKQSNNKYAASSYLSLTPEQWKSHRSYSCQVTHEGSTVEKTVAPTECS

SEQ ID NO: 455 - protein, 214 aa, synthetic construct
DIQLTQSPSSLSASVGDRVTITCRASQTISRFLNWYQQKPGKAPELLIYVASSLQSGVPSRFSGSGSGTDFTLTISSLQPEDFATYYCQQSYSTLISFGQGTKLEITRTVAAPSVFIFPPSDEQLKSGTASVVCLLNNFYPREAKVQWKVDNALQSGNSQESVTEQDSKDSTYSLSSTLTLSKADYEKHKVYACEVTHQGLSSPVTKSFNRGEC

SEQ ID NO: 456 - protein, 216 aa, synthetic construct
QSVLTQPPSVSAAPGQKVTISCSGSSSNIGNNYVSWYEQFPGTAPKLLIYDNNKRPSGIPDRFSGSKSGTSATLGITGLQTGDEADYYCGTWDSSLSAVVFGGGTKLTVLGQPKAAPSVTLFPPSSEELQANKATLVCLISDFYPGAVTVAWKADSSPVKAGVETTTPSKQSNNKYAASSYLSLTPEQWKSHRSYSCQVTHEGSTVEKTVAPTECS

SEQ ID NO: 457 - protein, 214 aa, synthetic construct
DIQLTQSPSSLSASVGDRVTITCRASQTISRFLNWYQQKPGKAPELLIYVASSLQSGVPSRFSGSGSGTDFTLTISSLQPEDFATYYCQQSYSTLISFGQGTKLEIKRTVAAPSVFIFPPSDEQLKSGTASVVCLLNNFYPREAKVQWKVDNALQSGNSQESVTEQDSKDSTYSLSSTLTLSKADYEKHKVYACEVTHQGLSSPVTKSFNRGEC

SEQ ID NO: 458 - protein, 214 aa, synthetic construct; identical to SEQ ID NO: 457

SEQ ID NO: 459 - protein, 214 aa, synthetic construct; identical to SEQ ID NO: 455

SEQ ID NO: 460 - protein, 214 aa, synthetic construct
DIQLTQSPSSLSASVGDRVTITCRASQTISRFLNWYQQKPGKAPKLLIYVASSLQSGVPSRFSGSGSGTDFTLTISSLQPEDFATYYCQQSYSTLISFGQGTKLEIKRTVAAPSVFIFPPSDEQLKSGTASVVCLLNNFYPREAKVQWKVDNALQSGNSQESVTEQDSKDSTYSLSSTLTLSKADYEKHKVYACEVTHQGLSSPVTKSFNRGEC

SEQ ID NO: 461 - protein, 214 aa, synthetic construct; identical to SEQ ID NO: 457

SEQ ID NO: 462 - protein, 214 aa, synthetic construct; identical to SEQ ID NO: 457

SEQ ID NO: 463 - protein, 216 aa, synthetic construct
QSVLTQPPSVSAAPGQKVTISCSGSSSNIGNNYVSWYQQLPGTAPKLLIYDNNKRPSGIPDRFSGSKSGTSATLGITGLQTGDEADYYCGTWDSSLSAVVFGGGTKLTVLGQPKAAPSVTLFPPSSEELQANKATLVCLISDFYPGAVTVAWKADSSPVKAGVETTTPSKQSNNKYAASSYLSLTPEQWKSHRSYSCQVTHEGSTVEKTVAPTECS

SEQ ID NO: 464 - protein, 216 aa, synthetic construct; identical to SEQ ID NO: 463

SEQ ID NO: 465 - protein, 216 aa, synthetic construct; identical to SEQ ID NO: 456

SEQ ID NO: 466 - protein, 216 aa, synthetic construct
QSVLTQPPSVSAAPGQKVTISCSGSSSNIGNNYVSWYQQLPGTAPKLLIYDNNKRPSGIPDRFSGSKSGTSATLAITGLQTGDEADYYCGTFESSLSAVVFGGGTKLTVLGQPKAAPSVTLFPPSSEELQANKATLVCLISDFYPGAVTVAWKADSSPVKAGVETTTPSKQSNNKYAASSYLSLTPEQWKSHRSYSCQVTHEGSTVEKTVAPTECS

SEQ ID NO: 467 - protein, 216 aa, synthetic construct
QSVLTQPPSVSAAPGQKVTISCSGSSSNIGNNYVSWYQQLPGTAPKLLIYDNNKRPSGIPDRFSGSKSGTSATLAITGLQTGDEADYYCGTWDSSLSAVVFGGGTKLTVLGQPKAAPSVTLFPPSSEELQANKATLVCLISDFYPGAVTVAWKADSSPVKAGVETTTPSKQSNNKYAASSYLSLTPEQWKSHRSYSCQVTHEGSTVEKTVAPTECS

SEQ ID NO: 468 - protein, 216 aa, synthetic construct; identical to SEQ ID NO: 467

SEQ ID NO: 469 - protein, 216 aa, synthetic construct; identical to SEQ ID NO: 463

SEQ ID NO: 470 - protein, 216 aa, synthetic construct; identical to SEQ ID NO: 466

SEQ ID NO: 471 - protein, 214 aa, synthetic construct
DIQLTQSPSSLSASVGDRVTITCRASQTISRFLNWYQQKPGKAPKLLIYVASSLQSGVPSRFSGSGSGTDFTLTISSLQPEDFATYYCQQSYSTLLSFGQGTKLEIKRTVAAPSVFIFPPSDEQLKSGTASVVCLLNNFYPREAKVQWKVDNALQSGNSQESVTEQDSKDSTYSLSSTLTLSKADYEKHKVYACEVTHQGLSSPVTKSFNRGEC

SEQ ID NO: 472 - protein, 458 aa, synthetic construct
QMQVVQSGAEVKKPGASVKVSCKASGYTFTGYYMHWVRQAPGQGLEWMGWINPNSGGTNYAQKFQGRVTMTRDTSISTAYMELSRLRSDDTAVYYCARGGDYVWGTYRPHYYYGMDVWGQGTTVTVSSASTKGPSVFPLAPSSKSTSGGTAALGCLVKDYFPEPVTVSWNSGALTSGVHTFPAVLQSSGLYSLSSVVTVPSSSLGTQTYICNVNHKPSNTKVDKKVEPKSCDKTHTCPPCPAPELLGGPSVFLFPPKPKDTLMISRTPEVTCVVVDVSHEDPEVKFNWYVDGVEVHNAKTKPCEEQYGSTYRCVSVLTVLHQDWLNGKEYKCKVSNKALPAPIEKTISKAKGQPREPQVYTLPPSREEMTKNQVSLTCLVKGFYPSDIAVEWESNGQPENNYKTTPPVLDSDGSFFLYSKLTVDKSRWQQGNVFSCSVMHEALHNHYTQKSLSLSPGK

SEQ ID NO: 473 - protein, 451 aa, synthetic construct
QVQLVESGGGVVQPGRSLRLSCAASGFTFSNFGMHWVRQAPGKGLEWVAVIWYDGSNENYADSVKGRFTISRDNSKNTLYLHMNSLRVADTAVYYCARDGTIFGVVLGDYWGQGTLVTVSSASTKGPSVFPLAPSSKSTSGGTAALGCLVKDYFPEPVTVSWNSGALTSGVHTFPAVLQSSGLYSLSSVVTVPSSSLGTQTYICNVNHKPSNTKVDKKVEPKSCDKTHTCPPCPAPELLGGPSVFLFPPKPKDTLMISRTPEVTCVVVDVSHEDPEVKFNWYVDGVEVHNAKTKPCEEQYGSTYRCVSVLTVLHQDWLNGKEYKCKVSNKALPAPIEKTISKAKGQPREPQVYTLPPSREEMTKNQVSLTCLVKGFYPSDIAVEWESNGQPENNYKTTPPVLDSDGSFFLYSKLTVDKSRWQQGNVFSCSVMHEALHNHYTQKSLSLSPGK

SEQ ID NO: 474 - protein, 451 aa, synthetic construct
QVQLVESGGGVVQPGRSLRLSCAASGFTFSYFGMHWVRQAPGKGLEWVAVIWYDGSNKYYADSVKGRFTISRDNSKNTLYLQMNSLRAEDTAVYYCARDGTIFGVLLGDYWGQGTLVTVSSASTKGPSVFPLAPSSKSTSGGTAALGCLVKDYFPEPVTVSWNSGALTSGVHTFPAVLQSSGLYSLSSVVTVPSSSLGTQTYICNVNHKPSNTKVDKKVEPKSCDKTHTCPPCPAPELLGGPSVFLFPPKPKDTLMISRTPEVTCVVVDVSHEDPEVKFNWYVDGVEVHNAKTKPCEEQYGSTYRCVSVLTVLHQDWLNGKEYKCKVSNKALPAPIEKTISKAKGQPREPQVYTLPPSREEMTKNQVSLTCLVKGFYPSDIAVEWESNGQPENNYKTTPPVLDSDGSFFLYSKLTVDKSRWQQGNVFSCSVMHEALHNHYTQKSLSLSPGK

SEQ ID NO: 475 - protein, 450 aa, synthetic construct
QVQLVESGGGVVQPGRSLRLSCAASGFTFSSYGMHWVRQAPGKGLEWVAVIWYDGSNKYYADSVKGRFTISSDNSKNTLYLQMNSLRAEDTAVYYCARDRTIFGVVLDYWGQGTLVTVSSASTKGPSVFPLAPSSKSTSGGTAALGCLVKDYFPEPVTVSWNSGALTSGVHTFPAVLQSSGLYSLSSVVTVPSSSLGTQTYICNVNHKPSNTKVDKKVEPKSCDKTHTCPPCPAPELLGGPSVFLFPPKPKDTLMISRTPEVTCVVVDVSHEDPEVKFNWYVDGVEVHNAKTKPCEEQYGSTYRCVSVLTVLHQDWLNGKEYKCKVSNKALPAPIEKTISKAKGQPREPQVYTLPPSREEMTKNQVSLTCLVKGFYPSDIAVEWESNGQPENNYKTTPPVLDSDGSFFLYSKLTVDKSRWQQGNVFSCSVMHEALHNHYTQKSLSLSPGK

SEQ ID NO: 476 - protein, 453 aa, synthetic construct
QVPLVQSGAEVKKPGASVKVSCKASGYTFTGYYIHWVRQAPGQGLEWMGWINPDSGGTDYSQRFQGRFTMTRDTSISTAYMELNRLRSDDTAVYYCAREATIFGMVIVPFDYWGQGTLVTVSSASTKGPSVFPLAPSSKSTSGGTAALGCLVKDYFPEPVTVSWNSGALTSGVHTFPAVLQSSGLYSLSSVVTVPSSSLGTQTYICNVNHKPSNTKVDKKVEPKSCDKTHTCPPCPAPELLGGPSVFLFPPKPKDTLMISRTPEVTCVVVDVSHEDPEVKFNWYVDGVEVHNAKTKPCEEQYGSTYRCVSVLTVLHQDWLNGKEYKCKVSNKALPAPIEKTISKAKGQPREPQVYTLPPSREEMTKNQVSLTCLVKGFYPSDIAVEWESNGQPENNYKTTPPVLDSDGSFFLYSKLTVDKSRWQQGNVFSCSVMHEALHNHYTQKSLSLSPGK

SEQ ID NO: 477 - protein, 453 aa, synthetic construct
QVPLVQSGAEVKKPGASVKVSCKASGYTFTGYYIHWVRQAPGQGLEWMGWINPDSGGTDYSQRFQGRFTMTRDTSISTAYMELSRLRSDDTAVYYCAREATIFGMVIVPFDYWGQGTLVTVSSASTKGPSVFPLAPSSKSTSGGTAALGCLVKDYFPEPVTVSWNSGALTSGVHTFPAVLQSSGLYSLSSVVTVPSSSLGTQTYICNVNHKPSNTKVDKKVEPKSCDKTHTCPPCPAPELLGGPSVFLFPPKPKDTLMISRTPEVTCVVVDVSHEDPEVKFNWYVDGVEVHNAKTKPCEEQYGSTYRCVSVLTVLHQDWLNGKEYKCKVSNKALPAPIEKTISKAKGQPREPQVYTLPPSREEMTKNQVSLTCLVKGFYPSDIAVEWESNGQPENNYKTTPPVLDSDGSFFLYSKLTVDKSRWQQGNVFSCSVMHEALHNHYTQKSLSLSPGK

SEQ ID NO: 478 - protein, 453 aa, synthetic construct
QVPLVQSGAEVKKPGASVKVSCKASGYTFTGYYIHWVRQAPGQGLVWMGWISPNSGDTSYAQKFQDRVTMTRDTSISTAYMELSRLRSDDTAVYFCTREATIFGMLIVPFDYWGQGTLVTVSSASTKGPSVFPLAPSSKSTSGGTAALGCLVKDYFPEPVTVSWNSGALTSGVHTFPAVLQSSGLYSLSSVVTVPSSSLGTQTYICNVNHKPSNTKVDKKVEPKSCDKTHTCPPCPAPELLGGPSVFLFPPKPKDTLMISRTPEVTCVVVDVSHEDPEVKFNWYVDGVEVHNAKTKPCEEQYGSTYRCVSVLTVLHQDWLNGKEYKCKVSNKALPAPIEKTISKAKGQPREPQVYTLPPSREEMTKNQVSLTCLVKGFYPSDIAVEWESNGQPENNYKTTPPVLDSDGSFFLYSKLTVDKSRWQQGNVFSCSVMHEALHNHYTQKSLSLSPGK

SEQ ID NO: 479 - protein, 453 aa, synthetic construct
QVPLVQSGAEVKKPGASVKVSCKASGYTFTGYYIHWVRQAPGQGLEWMGWISPNNGDTNYAQKFQDRVTMTRDTSISTAYMELSRLRSDDTAVYYCTREATIFGMLIVPFDYWGQGTLVTVSSASTKGPSVFPLAPSSKSTSGGTAALGCLVKDYFPEPVTVSWNSGALTSGVHTFPAVLQSSGLYSLSSVVTVPSSSLGTQTYICNVNHKPSNTKVDKKVEPKSCDKTHTCPPCPAPELLGGPSVFLFPPKPKDTLMISRTPEVTCVVVDVSHEDPEVKFNWYVDGVEVHNAKTKPCEEQYGSTYRCVSVLTVLHQDWLNGKEYKCKVSNKALPAPIEKTISKAKGQPREPQVYTLPPSREEMTKNQVSLTCLVKGFYPSDIAVEWESNGQPENNYKTTPPVLDSDGSFFLYSKLTVDKSRWQQGNVFSCSVMHEALHNHYTQKSLSLSPGK

SEQ ID NO: 480 - protein, 456 aa, synthetic construct
QVQLQESGPGLVKPSQTLSLTCTVSGDSISSGGYYWSWIRQHPGKGLEWIGYIYYSGSTYYNPSLKSRVTISVDTSKNQFSLKLSSVTAADTAVYYCARDRITIFGVVMGGGMDVWGQGTTVTVSSASTKGPSVFPLAPSSKSTSGGTAALGCLVKDYFPEPVTVSWNSGALTSGVHTFPAVLQSSGLYSLSSVVTVPSSSLGTQTYICNVNHKPSNTKVDKKVEPKSCDKTHTCPPCPAPELLGGPSVFLFPPKPKDTLMISRTPEVTCVVVDVSHEDPEVKFNWYVDGVEVHNAKTKPCEEQYGSTYRCVSVLTVLHQDWLNGKEYKCKVSNKALPAPIEKTISKAKGQPREPQVYTLPPSREEMTKNQVSLTCLVKGFYPSDIAVEWESNGQPENNYKTTPPVLDSDGSFFLYSKLTVDKSRWQQGNVFSCSVMHEALHNHYTQKSLSLSPGK

SEQ ID NO: 481 - protein, 450 aa, synthetic construct
QVQLVESGGGVVQPGRSLRLSCAASGFTFSNYGMHWVRQAPGEGLEWVAAIWFDGSDKYYADSVKGRFTISRDNSKNTLYLQMNSLRAEDTAVYYCARDQAIFGVVPDYWGQGTLVTVSSASTKGPSVFPLAPSSKSTSGGTAALGCLVKDYFPEPVTVSWNSGALTSGVHTFPAVLQSSGLYSLSSVVTVPSSSLGTQTYICNVNHKPSNTKVDKKVEPKSCDKTHTCPPCPAPELLGGPSVFLFPPKPKDTLMISRTPEVTCVVVDVSHEDPEVKFNWYVDGVEVHNAKTKPCEEQYGSTYRCVSVLTVLHQDWLNGKEYKCKVSNKALPAPIEKTISKAKGQPREPQVYTLPPSREEMTKNQVSLTCLVKGFYPSDIAVEWESNGQPENNYKTTPPVLDSDGSFFLYSKLTVDKSRWQQGNVFSCSVMHEALHNHYTQKSLSLSPGK

SEQ ID NO: 482 - protein, 451 aa, synthetic construct; identical to SEQ ID NO: 474

SEQ ID NO: 483 - protein, 450 aa, synthetic construct
QVQLVESGGGVVQPGRSLRLSCAASGFSFSSYGMHWVRQPPGKGLEWVAAIWYDGNNKYYADSVKGRFTISRDSSKNTLYLQMNSLRAEDTAVYYCARDRTIFGVVLEYLGQGTLVTVSSASTKGPSVFPLAPSSKSTSGGTAALGCLVKDYFPEPVTVSWNSGALTSGVHTFPAVLQSSGLYSLSSVVTVPSSSLGTQTYICNVNHKPSNTKVDKKVEPKSCDKTHTCPPCPAPELLGGPSVFLFPPKPKDTLMISRTPEVTCVVVDVSHEDPEVKFNWYVDGVEVHNAKTKPCEEQYGSTYRCVSVLTVLHQDWLNGKEYKCKVSNKALPAPIEKTISKAKGQPREPQVYTLPPSREEMTKNQVSLTCLVKGFYPSDIAVEWESNGQPENNYKTTPPVLDSDGSFFLYSKLTVDKSRWQQGNVFSCSVMHEALHNHYTQKSLSLSPGK

SEQ ID NO: 484 - protein, 447 aa, synthetic construct
QVQLQESGPGLVKPSETLSLTCTVSQGSISSYYWSWIRQPAGKGLEWIGRIYTSGSTNYNPSLKSRVTMSIDTSKNQFSLKLNSVTAADTAVYYCARDVAVAGFDYWGQGTLVTVSSASTKGPSVFPLAPSSKSTSGGTAALGCLVKDYFPEPVTVSWNSGALTSGVHTFPAVLQSSGLYSLSSVVTVPSSSLGTQTYICNVNHKPSNTKVDKKVEPKSCDKTHTCPPCPAPELLGGPSVFLFPPKPKDTLMISRTPEVTCVVVDVSHEDPEVKFNWYVDGVEVHNAKTKPCEEQYGSTYRCVSVLTVLHQDWLNGKEYKCKVSNKALPAPIEKTISKAKGQPREPQVYTLPPSREEMTKNQVSLTCLVKGFYPSDIAVEWESNGQPENNYKTTPPVLDSDGSFFLYSKLTVDKSRWQQGNVFSCSVMHEALHNHYTQKSLSLSPGK

SEQ ID NO: 485 - protein, 447 aa, synthetic construct
QVQLQESGPGLVKPSETLSLTCTVSGGSISSYYWSWIRQPAGKGLEWIGRIYTSGSTNYNPSLKSRVTMSIDTSKNQFSLKLNSVTAADTAVYYCARDVAVAGFDYWGQGTLVTVSSASTKGPSVFPLAPSSKSTSGGTAALGCLVKDYFPEPVTVSWNSGALTSGVHTFPAVLQSSGLYSLSSVVTVPSSSLGTQTYICNVNHKPSNTKVDKKVEPKSCDKTHTCPPCPAPELLGGPSVFLFPPKPKDTLMISRTPEVTCVVVDVSHEDPEVKFNWYVDGVEVHNAKTKPCEEQYGSTYRCVSVLTVLHQDWLNGKEYKCKVSNKALPAPIEKTISKAKGQPREPQVYTLPPSREEMTKNQVSLTCLVKGFYPSDIAVEWESNGQPENNYKTTPPVLDSDGSFFLYSKLTVDKSRWQQGNVFSCSVMHEALHNHYTQKSLSLSPGK

SEQ ID NO: 486 - protein, 451 aa, synthetic construct
QVQLVESGGGVVQPGRSLRLSCAASGFTFSYFGMHWVRQAPGKGLEWVAVIWYDASNKYYADAVKGRFTISRDNSKNTLYLQMNSLRAEDTAVYYCARDGTIFGVLLGDYWGQGTLVTVSSASTKGPSVFPLAPSSKSTSGGTAALGCLVKDYFPEPVTVSWNSGALTSGVHTFPAVLQSSGLYSLSSVVTVPSSSLGTQTYICNVNHKPSNTKVDKKVEPKSCDKTHTCPPCPAPELLGGPSVFLFPPKPKDTLMISRTPEVTCVVVDVSHEDPEVKFNWYVDGVEVHNAKTKPCEEQYGSTYRCVSVLTVLHQDWLNGKEYKCKVSNKALPAPIEKTISKAKGQPREPQVYTLPPSREEMTKNQVSLTCLVKGFYPSDIAVEWESNGQPENNYKTTPPVLDSDGSFFLYSKLTVDKSRWQQGNVFSCSVMHEALHNHYTQKSLSLSPGK

SEQ ID NO: 487 - protein, 451 aa, synthetic construct
QVQLVESGGGVVQPGRSLRLSCAASGFTFSYFGMHWVRQAPGKGLEWVAVIWYDASNKYYADSVKGRFTISRDNSKNTLYLQMNSLRAEDTAVYYCARDGTIFGVLLGDYWGQGTLVTVSSASTKGPSVFPLAPSSKSTSGGTAALGCLVKDYFPEPVTVSWNSGALTSGVHTFPAVLQSSGLYSLSSVVTVPSSSLGTQTYICNVNHKPSNTKVDKKVEPKSCDKTHTCPPCPAPELLGGPSVFLFPPKPKDTLMISRTPEVTCVVVDVSHEDPEVKFNWYVDGVEVHNAKTKPCEEQYGSTYRCVSVLTVLHQDWLNGKEYKCKVSNKALPAPIEKTISKAKGQPREPQVYTLPPSREEMTKNQVSLTCLVKGFYPSDIAVEWESNGQPENNYKTTPPVLDSDGSFFLYSKLTVDKSRWQQGNVFSCSVMHEALHNHYTQKSLSLSPGK

SEQ ID NO: 488 - protein, 451 aa, synthetic construct
QVQLVESGGGVVQPGRSLRLSCAASGFTFSYFGMHWVRQAPGKGLEWVAVIWYDGSNKYYADAVKGRFTISRDNSKNTLYLQMNSLRAEDTAVYYCARDGTIFGVLLGDYWGQGTLVTVSSASTKGPSVFPLAPSSKSTSGGTAALGCLVKDYFPEPVTVSWNSGALTSGVHTFPAVLQSSGLYSLSSVVTVPSSSLGTQTYICNVNHKPSNTKVDKKVEPKSCDKTHTCPPCPAPELLGGPSVFLFPPKPKDTLMISRTPEVTCVVVDVSHEDPEVKFNWYVDGVEVHNAKTKPCEEQYGSTYRCVSVLTVLHQDWLNGKEYKCKVSNKALPAPIEKTISKAKGQPREPQVYTLPPSREEMTKNQVSLTCLVKGFYPSDIAVEWESNGQPENNYKTTPPVLDSDGSFFLYSKLTVDKSRWQQGNVFSCSVMHEALHNHYTQKSLSLSPGK

SEQ ID NO: 489 - protein, 451 aa, synthetic construct; identical to SEQ ID NO: 486

SEQ ID NO: 490 - protein, 451 aa, synthetic construct; identical to SEQ ID NO: 486

SEQ ID NO: 491 - protein, 451 aa, synthetic construct
QVQLVESGGGVVQPGRSLRLSCAASGFTFSYFGMHWVRQAPGKGLEWVAVIWYDASNKYYADAVKGRFTISRDNSKNTLYLQMNSLRAEDTAVYYCARDRTIFGVLLGDYWGQGTLVTVSSASTKGPSVFPLAPSSKSTSGGTAALGCLVKDYFPEPVTVSWNSGALTSGVHTFPAVLQSSGLYSLSSVVTVPSSSLGTQTYICNVNHKPSNTKVDKKVEPKSCDKTHTCPPCPAPELLGGPSVFLFPPKPKDTLMISRTPEVTCVVVDVSHEDPEVKFNWYVDGVEVHNAKTKPCEEQYGSTYRCVSVLTVLHQDWLNGKEYKCKVSNKALPAPIEKTISKAKGQPREPQVYTLPPSREEMTKNQVSLTCLVKGFYPSDIAVEWESNGQPENNYKTTPPVLDSDGSFFLYSKLTVDKSRWQQGNVFSCSVMHEALHNHYTQKSLSLSPGK

SEQ ID NO: 492 - protein, 451 aa, synthetic construct
QVQLVESGGGVVQPGRSLRLSCAASGFTFSNFGMHWVRQAPGKGLEWVAVIWYDASNENYADAVKGRFTISRDNSKNTLYLQMNSLRVADTAVYYCARDGTIFGVVLGDYWGQGTLVTVSSASTKGPSVFPLAPSSKSTSGGTAALGCLVKDYFPEPVTVSWNSGALTSGVHTFPAVLQSSGLYSLSSVVTVPSSSLGTQTYICNVNHKPSNTKVDKKVEPKSCDKTHTCPPCPAPELLGGPSVFLFPPKPKDTLMISRTPEVTCVVVDVSHEDPEVKFNWYVDGVEVHNAKTKPCEEQYGSTYRCVSVLTVLHQDWLNGKEYKCKVSNKALPAPIEKTISKAKGQPREPQVYTLPPSREEMTKNQVSLTCLVKGFYPSDIAVEWESNGQPENNYKTTPPVLDSDGSFFLYSKLTVDKSRWQQGNVFSCSVMHEALHNHYTQKSLSLSPGK

SEQ ID NO: 493 - protein, 451 aa, synthetic construct; identical to SEQ ID NO: 492

SEQ ID NO: 494 - protein, 451 aa, synthetic construct; identical to SEQ ID NO: 492

SEQ ID NO: 495 - protein, 451 aa, synthetic construct
QVQLVESGGGVVQPGRSLRLSCAASGFTFSNFGMHWVRQAPGKGLEWVAVIWYDASNENYADSVKGRFTISRDNSKNTLYLHMNSLRVADTAVYYCARDGTIFGVVLGDYWGQGTLVTVSSASTKGPSVFPLAPSSKSTSGGTAALGCLVKDYFPEPVTVSWNSGALTSGVHTFPAVLQSSGLYSLSSVVTVPSSSLGTQTYICNVNHKPSNTKVDKKVEPKSCDKTHTCPPCPAPELLGGPSVFLFPPKPKDTLMISRTPEVTCVVVDVSHEDPEVKFNWYVDGVEVHNAKTKPCEEQYGSTYRCVSVLTVLHQDWLNGKEYKCKVSNKALPAPIEKTISKAKGQPREPQVYTLPPSREEMTKNQVSLTCLVKGFYPSDIAVEWESNGQPENNYKTTPPVLDSDGSFFLYSKLTVDKSRWQQGNVFSCSVMHEALHNHYTQKSLSLSPGK

SEQ ID NO: 496 - protein, 451 aa, synthetic construct
QVQLVESGGGVVQPGRSLRLSCAASGFTFSNFGMHWVRQAPGKGLEWVAVIWYDGSNENYADAVKGRFTISRDNSKNTLYLHMNSLRVADTAVYYCARDGTIFGVVLGDYWGQGTLVTVSSASTKGPSVFPLAPSSKSTSGGTAALGCLVKDYFPEPVTVSWNSGALTSGVHTFPAVLQSSGLYSLSSVVTVPSSSLGTQTYICNVNHKPSNTKVDKKVEPKSCDKTHTCPPCPAPELLGGPSVFLFPPKPKDTLMISRTPEVTCVVVDVSHEDPEVKFNWYVDGVEVHNAKTKPCEEQYGSTYRCVSVLTVLHQDWLNGKEYKCKVSNKALPAPIEKTISKAKGQPREPQVYTLPPSREEMTKNQVSLTCLVKGFYPSDIAVEWESNGQPENNYKTTPPVLDSDGSFFLYSKLTVDKSRWQQGNVFSCSVMHEALHNHYTQKSLSLSPGK

SEQ ID NO: 497 - protein, 451 aa, synthetic construct
QVQLVESGGGVVQPGRSLRLSCAASGFTFSNFGMHWVRQAPGKGLEWVAVIWYDASNENYADAVKGRFTISRDNSKNTLYLQMNSLRVEDTAVYYCARDRTIFGVVLGDYWGQGTLVTVSSASTKGPSVFPLAPSSKSTSGGTAALGCLVKDYFPEPVTVSWNSGALTSGVHTFPAVLQSSGLYSLSSVVTVPSSSLGTQTYICNVNHKPSNTKVDKKVEPKSCDKTHTCPPCPAPELLGGPSVFLFPPKPKDTLMISRTPEVTCVVVDVSHEDPEVKFNWYVDGVEVHNAKTKPCEEQYGSTYRCVSVLTVLHQDWLNGKEYKCKVSNKALPAPIEKTISKAKGQPREPQVYTLPPSREEMTKNQVSLTCLVKGFYPSDIAVEWESNGQPENNYKTTPPVLDSDGSFFLYSKLTVDKSRWQQGNVFSCSVMHEALHNHYTQKSLSLSPGK

SEQ ID NO: 498 - protein, 451 aa, synthetic construct
QVQLVESGGGVVQPGRSLRLSCAASGFTFSNFGMHWVRQAPGKGLEWVAVIWYDASNENYADAVKGRFTISRDNSKNTLYLQMNSLRVEDTAVYYCARDGTIFGVVLGDYWGQGTLVTVSSASTKGPSVFPLAPSSKSTSGGTAALGCLVKDYFPEPVTVSWNSGALTSGVHTFPAVLQSSGLYSLSSVVTVPSSSLGTQTYICNVNHKPSNTKVDKKVEPKSCDKTHTCPPCPAPELLGGPSVFLFPPKPKDTLMISRTPEVTCVVVDVSHEDPEVKFNWYVDGVEVHNAKTKPCEEQYGSTYRCVSVLTVLHQDWLNGKEYKCKVSNKALPAPIEKTISKAKGQPREPQVYTLPPSREEMTKNQVSLTCLVKGFYPSDIAVEWESNGQPENNYKTTPPVLDSDGSFFLYSKLTVDKSRWQQGNVFSCSVMHEALHNHYTQKSLSLSPGK

SEQ ID NO: 499 - protein, 451 aa, synthetic construct
QVQLVESGGGVVQPGRSLRLSCAASGFTFSNFGMHWVRQAPGKGLEWVAVIWYDGSNENYADSVKGRFTISRDNSKNTLYLHMNSLRAADTAVYYCARDGTIFGVVLGDYWGQGTLVTVSSASTKGPSVFPLAPSSKSTSGGTAALGCLVKDYFPEPVTVSWNSGALTSGVHTFPAVLQSSGLYSLSSVVTVPSSSLGTQTYICNVNHKPSNTKVDKKVEPKSCDKTHTCPPCPAPELLGGPSVFLFPPKPKDTLMISRTPEVTCVVVDVSHEDPEVKFNWYVDGVEVHNAKTKPCEEQYGSTYRCVSVLTVLHQDWLNGKEYKCKVSNKALPAPIEKTISKAKGQPREPQVYTLPPSREEMTKNQVSLTCLVKGFYPSDIAVEWESNGQPENNYKTTPPVLDSDGSFFLYSKLTVDKSRWQQGNVFSCSVMHEALHNHYTQKSLSLSPGK

SEQ ID NO: 500 - protein, 451 aa, synthetic construct
QVQLVESGGGVVQPGRSLRLSCAASGFTFSNFGMHWVRQAPGKGLEWVAVIWYDASNENYADAVKGRFTISRDNSKNTLYLQMNSLRAADTAVYYCARDGTIFGVVLGDYWGQGTLVTVSSASTKGPSVFPLAPSSKSTSGGTAALGCLVKDYFPEPVTVSWNSGALTSGVHTFPAVLQSSGLYSLSSVVTVPSSSLGTQTYICNVNHKPSNTKVDKKVEPKSCDKTHTCPPCPAPELLGGPSVFLFPPKPKDTLMISRTPEVTCVVVDVSHEDPEVKFNWYVDGVEVHNAKTKPCEEQYGSTYRCVSVLTVLHQDWLNGKEYKCKVSNKALPAPIEKTISKAKGQPREPQVYTLPPSREEMTKNQVSLTCLVKGFYPSDIAVEWESNGQPENNYKTTPPVLDSDGSFFLYSKLTVDKSRWQQGNVFSCSVMHEALHNHYTQKSLSLSPGK

SEQ ID NO: 501 - protein, 451 aa, synthetic construct
QVQLVESGGGVVQPGRSLRLSCAASGFTFSNFGMHWVRQAPGKGLEWVAVIWYDASNENYADAVKGRFTISRDNSKNTLYLHMNSLRAADTAVYYCARDGTIFGVVLGDYWGQGTLVTVSSASTKGPSVFPLAPSSKSTSGGTAALGCLVKDYFPEPVTVSWNSGALTSGVHTFPAVLQSSGLYSLSSVVTVPSSSLGTQTYICNVNHKPSNTKVDKKVEPKSCDKTHTCPPCPAPELLGGPSVFLFPPKPKDTLMISRTPEVTCVVVDVSHEDPEVKFNWYVDGVEVHNAKTKPCEEQYGSTYRCVSVLTVLHQDWLNGKEYKCKVSNKALPAPIEKTISKAKGQPREPQVYTLPPSREEMTKNQVSLTCLVKGFYPSDIAVEWESNGQPENNYKTTPPVLDSDGSFFLYSKLTVDKSRWQQGNVFSCSVMHEALHNHYTQKSLSLSPGK

SEQ ID NO: 502 - protein, 451 aa, synthetic construct; identical to SEQ ID NO: 500

SEQ ID NO: 503 - protein, 451 aa, synthetic construct; identical to SEQ ID NO: 500

SEQ ID NO: 504 - protein, 451 aa, synthetic construct; identical to SEQ ID NO: 501

SEQ ID NO: 505 - protein, 451 aa, synthetic construct; identical to SEQ ID NO: 501

SEQ ID NO: 506 - protein, 451 aa, synthetic construct; identical to SEQ ID NO: 500

SEQ ID NO: 507 - protein, 451 aa, synthetic construct
QVQLVESGGGVVQPGRSLRLSCAASGFTFSNFGMHWVRQAPGKGLEWVAVIWYDGSNENYADAVKGRFTISRDNSKNTLYLQMNSLRAADTAVYYCARDGTIFGVVLGDYWGQGTLVTVSSASTKGPSVFPLAPSSKSTSGGTAALGCLVKDYFPEPVTVSWNSGALTSGVHTFPAVLQSSGLYSLSSVVTVPSSSLGTQTYICNVNHKPSNTKVDKKVEPKSCDKTHTCPPCPAPELLGGPSVFLFPPKPKDTLMISRTPEVTCVVVDVSHEDPEVKFNWYVDGVEVHNAKTKPCEEQYGSTYRCVSVLTVLHQDWLNGKEYKCKVSNKALPAPIEKTISKAKGQPREPQVYTLPPSREEMTKNQVSLTCLVKGFYPSDIAVEWESNGQPENNYKTTPPVLDSDGSFFLYSKLTVDKSRWQQGNVFSCSVMHEALHNHYTQKSLSLSPGK

SEQ ID NO: 508 - protein, 451 aa, synthetic construct
QVQLVESGGGVVQPGRSLRLSCAASGFTFSNFGMHWVRQAPGKGLEWVAVIWYDASNENYADSVKGRFTISRDNSKNTLYLQMNSLRAADTAVYYCARDGTIFGVVLGDYWGQGTLVTVSSASTKGPSVFPLAPSSKSTSGGTAALGCLVKDYFPEPVTVSWNSGALTSGVHTFPAVLQSSGLYSLSSVVTVPSSSLGTQTYICNVNHKPSNTKVDKKVEPKSCDKTHTCPPCPAPELLGGPSVFLFPPKPKDTLMISRTPEVTCVVVDVSHEDPEVKFNWYVDGVEVHNAKTKPCEEQYGSTYRCVSVLTVLHQDWLNGKEYKCKVSNKALPAPIEKTISKAKGQPREPQVYTLPPSREEMTKNQVSLTCLVKGFYPSDIAVEWESNGQPENNYKTTPPVLDSDGSFFLYSKLTVDKSRWQQGNVFSCSVMHEALHNHYTQKSLSLSPGK

SEQ ID NO: 509 - protein, 451 aa, synthetic construct
QVQLVESGGGVVQPGRSLRLSCAASGFTFSNFGMHWVRQAPGKGLEWVAVIWYDASNENYADAVKGRFTISRDNSKNTLYLQMNSLRAEDTAVYYCARDRTIFGVVLGDYWGQGTLVTVSSASTKGPSVFPLAPSSKSTSGGTAALGCLVKDYFPEPVTVSWNSGALTSGVHTFPAVLQSSGLYSLSSVVTVPSSSLGTQTYICNVNHKPSNTKVDKKVEPKSCDKTHTCPPCPAPELLGGPSVFLFPPKPKDTLMISRTPEVTCVVVDVSHEDPEVKFNWYVDGVEVHNAKTKPCEEQYGSTYRCVSVLTVLHQDWLNGKEYKCKVSNKALPAPIEKTISKAKGQPREPQVYTLPPSREEMTKNQVSLTCLVKGFYPSDIAVEWESNGQPENNYKTTPPVLDSDGSFFLYSKLTVDKSRWQQGNVFSCSVMHEALHNHYTQKSLSLSPGK

SEQ ID NO: 510 - protein, 451 aa, synthetic construct
QVQLVESGGGVVQPGRSLRLSCAASGFTFSNFGMHWVRQAPGKGLEWVAVIWYDASNENYADAVKGRFTISRDNSKNTLYLQMNSLRAEDTAVYYCARDGTIFGVVLGDYWGQGTLVTVSSASTKGPSVFPLAPSSKSTSGGTAALGCLVKDYFPEPVTVSWNSGALTSGVHTFPAVLQSSGLYSLSSVVTVPSSSLGTQTYICNVNHKPSNTKVDKKVEPKSCDKTHTCPPCPAPELLGGPSVFLFPPKPKDTLMISRTPEVTCVVVDVSHEDPEVKFNWYVDGVEVHNAKTKPCEEQYGSTYRCVSVLTVLHQDWLNGKEYKCKVSNKALPAPIEKTISKAKGQPREPQVYTLPPSREEMTKNQVSLTCLVKGFYPSDIAVEWESNGQPENNYKTTPPVLDSDGSFFLYSKLTVDKSRWQQGNVFSCSVMHEALHNHYTQKSLSLSPGK

SEQ ID NO: 511 - protein, 450 aa, synthetic construct
QVQLVESGGGVVQPGRSLRLSCAASGFTFSSYGMHWVRQAPGKGLEWVAVIWYDASNKYYADAVKGRFTISRDNSKNTLYLQMNSLRAEDTAVYYCARDRTIFGVVLDYWGQGTLVTVSSASTKGPSVFPLAPSSKSTSGGTAALGCLVKDYFPEPVTVSWNSGALTSGVHTFPAVLQSSGLYSLSSVVTVPSSSLGTQTYICNVNHKPSNTKVDKKVEPKSCDKTHTCPPCPAPELLGGPSVFLFPPKPKDTLMISRTPEVTCVVVDVSHEDPEVKFNWYVDGVEVHNAKTKPCEEQYGSTYRCVSVLTVLHQDWLNGKEYKCKVSNKALPAPIEKTISKAKGQPREPQVYTLPPSREEMTKNQVSLTCLVKGFYPSDIAVEWESNGQPENNYKTTPPVLDSDGSFFLYSKLTVDKSRWQQGNVFSCSVMHEALHNHYTQKSLSLSPGK

SEQ ID NO: 512 - protein, 450 aa, synthetic construct
QVQLVESGGGVVQPGRSLRLSCAASGFTFSSYGMHWVRQAPGKGLEWVAVIWYDASNKYYADAVKGRFTISSDNSKNTLYLQMNSLRAEDTAVYYCARDRTIFGVVLDYWGQGTLVTVSSASTKGPSVFPLAPSSKSTSGGTAALGCLVKDYFPEPVTVSWNSGALTSGVHTFPAVLQSSGLYSLSSVVTVPSSSLGTQTYICNVNHKPSNTKVDKKVEPKSCDKTHTCPPCPAPELLGGPSVFLFPPKPKDTLMISRTPEVTCVVVDVSHEDPEVKFNWYVDGVEVHNAKTKPCEEQYGSTYRCVSVLTVLHQDWLNGKEYKCKVSNKALPAPIEKTISKAKGQPREPQVYTLPPSREEMTKNQVSLTCLVKGFYPSDIAVEWESNGQPENNYKTTPPVLDSDGSFFLYSKLTVDKSRWQQGNVFSCSVMHEALHNHYTQKSLSLSPGK

SEQ ID NO: 513 - protein, 450 aa, synthetic construct; identical to SEQ ID NO: 511

SEQ ID NO: 514 - protein, 450 aa, synthetic construct; identical to SEQ ID NO: 511

SEQ ID NO: 515 - protein, 450 aa, synthetic construct; identical to SEQ ID NO: 512

SEQ ID NO: 516 - protein, 450 aa, synthetic construct; identical to SEQ ID NO: 512

SEQ ID NO: 517 - protein, 450 aa, synthetic construct; identical to SEQ ID NO: 511

SEQ ID NO: 518 - protein, 450 aa, synthetic construct
QVQLVESGGGVVQPGRSLRLSCAASGFTFSSYGMHWVRQAPGKGLEWVAVIWYDASNKYYADSVKGRFTISRDNSKNTLYLQMNSLRAEDTAVYYCARDRTIFGVVLDYWGQGTLVTVSSASTKGPSVFPLAPSSKSTSGGTAALGCLVKDYFPEPVTVSWNSGALTSGVHTFPAVLQSSGLYSLSSVVTVPSSSLGTQTYICNVNHKPSNTKVDKKVEPKSCDKTHTCPPCPAPELLGGPSVFLFPPKPKDTLMISRTPEVTCVVVDVSHEDPEVKFNWYVDGVEVHNAKTKPCEEQYGSTYRCVSVLTVLHQDWLNGKEYKCKVSNKALPAPIEKTISKAKGQPREPQVYTLPPSREEMTKNQVSLTCLVKGFYPSDIAVEWESNGQPENNYKTTPPVLDSDGSFFLYSKLTVDKSRWQQGNVFSCSVMHEALHNHYTQKSLSLSPGK

SEQ ID NO: 519 - protein, 450 aa, synthetic construct
QVQLVESGGGVVQPGRSLRLSCAASGFTFSSYGMHWVRQAPGKGLEWVAVIWYDGSNKYYADAVKGRFTISRDNSKNTLYLQMNSLRAEDTAVYYCARDRTIFGVVLDYWGQGTLVTVSSASTKGPSVFPLAPSSKSTSGGTAALGCLVKDYFPEPVTVSWNSGALTSGVHTFPAVLQSSGLYSLSSVVTVPSSSLGTQTYICNVNHKPSNTKVDKKVEPKSCDKTHTCPPCPAPELLGGPSVFLFPPKPKDTLMISRTPEVTCVVVDVSHEDPEVKFNWYVDGVEVHNAKTKPCEEQYGSTYRCVSVLTVLHQDWLNGKEYKCKVSNKALPAPIEKTISKAKGQPREPQVYTLPPSREEMTKNQVSLTCLVKGFYPSDIAVEWESNGQPENNYKTTPPVLDSDGSFFLYSKLTVDKSRWQQGNVFSCSVMHEALHNHYTQKSLSLSPGK

SEQ ID NO: 520 - protein, 451 aa, synthetic construct; identical to SEQ ID NO: 486

SEQ ID NO: 521 - protein, 451 aa, synthetic construct; identical to SEQ ID NO: 491

SEQ ID NO: 522 - protein, 451 aa, synthetic construct; identical to SEQ ID NO: 486

SEQ ID NO: 523 - protein, 451 aa, synthetic construct; identical to SEQ ID NO: 491

SEQ ID NO: 524 - protein, 451 aa, synthetic construct; identical to SEQ ID NO: 474

SEQ ID NO: 525 - protein, 451 aa, synthetic construct; identical to SEQ ID NO: 487

SEQ ID NO: 526 - protein, 451 aa, synthetic construct; identical to SEQ ID NO: 488

SEQ ID NO: 527 - protein, 450 aa, synthetic construct
QVQLVESGGGVVQPGRSLRLSCAASGFSFSSYGMHWVRQPPGKGLEWVAAIWYDANNKYYADAVKGRFTISRDSSKNTLYLQMNSLRAEDTAVYYCARDRTIFGVVLEYWGQGTLVTVSSASTKGPSVFPLAPSSKSTSGGTAALGCLVKDYFPEPVTVSWNSGALTSGVHTFPAVLQSSGLYSLSSVVTVPSSSLGTQTYICNVNHKPSNTKVDKKVEPKSCDKTHTCPPCPAPELLGGPSVFLFPPKPKDTLMISRTPEVTCVVVDVSHEDPEVKFNWYVDGVEVHNAKTKPCEEQYGSTYRCVSVLTVLHQDWLNGKEYKCKVSNKALPAPIEKTISKAKGQPREPQVYTLPPSREEMTKNQVSLTCLVKGFYPSDIAVEWESNGQPENNYKTTPPVLDSDGSFFLYSKLTVDKSRWQQGNVFSCSVMHEALHNHYTQKSLSLSPGK

SEQ ID NO: 528 - protein, 450 aa, synthetic construct; identical to SEQ ID NO: 527

SEQ ID NO: 529 - protein, 450 aa, synthetic construct
QVQLVESGGGVVQPGRSLRLSCAASGFSFSSYGMHWVRQPPGKGLEWVAAIWYDANNKYYADAVKGRFTISRDSSKNTLYLQMNSLRAEDTAVYYCARDRTIFGVVLEYLGQGTLVTVSSASTKGPSVFPLAPSSKSTSGGTAALGCLVKDYFPEPVTVSWNSGALTSGVHTFPAVLQSSGLYSLSSVVTVPSSSLGTQTYICNVNHKPSNTKVDKKVEPKSCDKTHTCPPCPAPELLGGPSVFLFPPKPKDTLMISRTPEVTCVVVDVSHEDPEVKFNWYVDGVEVHNAKTKPCEEQYGSTYRCVSVLTVLHQDWLNGKEYKCKVSNKALPAPIEKTISKAKGQPREPQVYTLPPSREEMTKNQVSLTCLVKGFYPSDIAVEWESNGQPENNYKTTPPVLDSDGSFFLYSKLTVDKSRWQQGNVFSCSVMHEALHNHYTQKSLSLSPGK

SEQ ID NO: 530 - protein, 450 aa, synthetic construct; identical to SEQ ID NO: 527

SEQ ID NO: 531 - protein, 450 aa, synthetic construct; identical to SEQ ID NO: 529

SEQ ID NO: 532 - protein, 450 aa, synthetic construct; identical to SEQ ID NO: 529

SEQ ID NO: 533 - protein, 450 aa, synthetic construct; identical to SEQ ID NO: 527

SEQ ID NO: 534 - protein, 450 aa, synthetic construct
QVQLVESGGGVVQPGRSLRLSCAASGFSFSSYGMHWVRQPPGKGLEWVAAIWYDGNNKYYADAVKGRFTISRDSSKNTLYLQMNSLRAEDTAVYYCARDRTIFGVVLEYWGQGTLVTVSSASTKGPSVFPLAPSSKSTSGGTAALGCLVKDYFPEPVTVSWNSGALTSGVHTFPAVLQSSGLYSLSSVVTVPSSSLGTQTYICNVNHKPSNTKVDKKVEPKSCDKTHTCPPCPAPELLGGPSVFLFPPKPKDTLMISRTPEVTCVVVDVSHEDPEVKFNWYVDGVEVHNAKTKPCEEQYGSTYRCVSVLTVLHQDWLNGKEYKCKVSNKALPAPIEKTISKAKGQPREPQVYTLPPSREEMTKNQVSLTCLVKGFYPSDIAVEWESNGQPENNYKTTPPVLDSDGSFFLYSKLTVDKSRWQQGNVFSCSVMHEALHNHYTQKSLSLSPGK

SEQ ID NO: 535 - protein, 450 aa, synthetic construct
QVQLVESGGGVVQPGRSLRLSCAASGFSFSSYGMHWVRQPPGKGLEWVAAIWYDANNKYYADSVKGRFTISRDSSKNTLYLQMNSLRAEDTAVYYCARDRTIFGVVLEYWGQGTLVTVSSASTKGPSVFPLAPSSKSTSGGTAALGCLVKDYFPEPVTVSWNSGALTSGVHTFPAVLQSSGLYSLSSVVTVPSSSLGTQTYICNVNHKPSNTKVDKKVEPKSCDKTHTCPPCPAPELLGGPSVFLFPPKPKDTLMISRTPEVTCVVVDVSHEDPEVKFNWYVDGVEVHNAKTKPCEEQYGSTYRCVSVLTVLHQDWLNGKEYKCKVSNKALPAPIEKTISKAKGQPREPQVYTLPPSREEMTKNQVSLTCLVKGFYPSDIAVEWESNGQPENNYKTTPPVLDSDGSFFLYSKLTVDKSRWQQGNVFSCSVMHEALHNHYTQKSLSLSPGK

SEQ ID NO: 536 - protein, 450 aa, synthetic construct; identical to SEQ ID NO: 527

SEQ ID NO: 537 - protein, 450 aa, synthetic construct; identical to SEQ ID NO: 529

SEQ ID NO: 538 - protein, 450 aa, synthetic construct
QVQLVESGGGVVQPGRSLRLSCAASGFSFSSYGMHWVRQAPGKGLEWVAVIWYDASNKYYEDAVKGRFTISRDNSKNTLFLQVNSLRAEDTAVYYCARGITIFGHGFEYWGQGTLVTVSSASTKGPSVFPLAPSSKSTSGGTAALGCLVKDYFPEPVTVSWNSGALTSGVHTFPAVLQSSGLYSLSSVVTVPSSSLGTQTYICNVNHKPSNTKVDKKVEPKSCDKTHTCPPCPAPELLGGPSVFLFPPKPKDTLMISRTPEVTCVVVDVSHEDPEVKFNWYVDGVEVHNAKTKPCEEQYGSTYRCVSVLTVLHQDWLNGKEYKCKVSNKALPAPIEKTISKAKGQPREPQVYTLPPSREEMTKNQVSLTCLVKGFYPSDIAVEWESNGQPENNYKTTPPVLDSDGSFFLYSKLTVDKSRWQQGNVFSCSVMHEALHNHYTQKSLSLSPGK

SEQ ID NO: 539 - protein, 450 aa, synthetic construct
QVQLVESGGGVVQPGRSLRLSCAASGFSFSSYGMHWVRQAPGKGLEWVAVIWYDGSNKYYEDSVKGRFTISRDNSKNTLFLQVNSLRAEDTAVYYCARGITIFGHGFEYWGQGTLVTVSSASTKGPSVFPLAPSSKSTSGGTAALGCLVKDYFPEPVTVSWNSGALTSGVHTFPAVLQSSGLYSLSSVVTVPSSSLGTQTYICNVNHKPSNTKVDKKVEPKSCDKTHTCPPCPAPELLGGPSVFLFPPKPKDTLMISRTPEVTCVVVDVSHEDPEVKFNWYVDGVEVHNAKTKPCEEQYGSTYRCVSVLTVLHQDWLNGKEYKCKVSNKALPAPIEKTISKAKGQPREPQVYTLPPSREEMTKNQVSLTCLVKGFYPSDIAVEWESNGQPENNYKTTPPVLDSDGSFFLYSKLTVDKSRWQQGNVFSCSVMHEALHNHYTQKSLSLSPGK

SEQ ID NO: 540 - protein, 450 aa, synthetic construct
QVQLVESGGGVVQPGRSLRLSCAASGFSFSSYGMHWVRQAPGKGLEWVAVIWYDGSNKYYEDAVKGRFTISRDNSKNTLFLQVNSLRAEDTAVYYCARGITIFGHGFEYWGQGTLVTVSSASTKGPSVFPLAPSSKSTSGGTAALGCLVKDYFPEPVTVSWNSGALTSGVHTFPAVLQSSGLYSLSSVVTVPSSSLGTQTYICNVNHKPSNTKVDKKVEPKSCDKTHTCPPCPAPELLGGPSVFLFPPKPKDTLMISRTPEVTCVVVDVSHEDPEVKFNWYVDGVEVHNAKTKPCEEQYGSTYRCVSVLTVLHQDWLNGKEYKCKVSNKALPAPIEKTISKAKGQPREPQVYTLPPSREEMTKNQVSLTCLVKGFYPSDIAVEWESNGQPENNYKTTPPVLDSDGSFFLYSKLTVDKSRWQQGNVFSCSVMHEALHNHYTQKSLSLSPGK

SEQ ID NO: 541 - protein, 450 aa, synthetic construct
QVQLVESGGGVVQPGRSLRLSCAASGFSFSSYGMHWVRQAPGKGLEWVAVIWYDASNKYYEDSVKGRFTISRDNSKNTLFLQVNSLRAEDTAVYYCARGITIFGHGFEYWGQGTLVTVSSASTKGPSVFPLAPSSKSTSGGTAALGCLVKDYFPEPVTVSWNSGALTSGVHTFPAVLQSSGLYSLSSVVTVPSSSLGTQTYICNVNHKPSNTKVDKKVEPKSCDKTHTCPPCPAPELLGGPSVFLFPPKPKDTLMISRTPEVTCVVVDVSHEDPEVKFNWYVDGVEVHNAKTKPCEEQYGSTYRCVSVLTVLHQDWLNGKEYKCKVSNKALPAPIEKTISKAKGQPREPQVYTLPPSREEMTKNQVSLTCLVKGFYPSDIAVEWESNGQPENNYKTTPPVLDSDGSFFLYSKLTVDKSRWQQGNVFSCSVMHEALHNHYTQKSLSLSPGK

SEQ ID NO: 542 - protein, 450 aa, synthetic construct
QVQLVESGGGVVQPGRSLRLSCAASGFTFSNYGMHWVRQAPGEGLEWVAAIWFDASDKYYADAVKGRFTISRDNSKNTLYLQMNSLRAEDTAVYYCARDQAIFGVVPDYWGQGTLVTVSSASTKGPSVFPLAPSSKSTSGGTAALGCLVKDYFPEPVTVSWNSGALTSGVHTFPAVLQSSGLYSLSSVVTVPSSSLGTQTYICNVNHKPSNTKVDKKVEPKSCDKTHTCPPCPAPELLGGPSVFLFPPKPKDTLMISRTPEVTCVVVDVSHEDPEVKFNWYVDGVEVHNAKTKPCEEQYGSTYRCVSVLTVLHQDWLNGKEYKCKVSNKALPAPIEKTISKAKGQPREPQVYTLPPSREEMTKNQVSLTCLVKGFYPSDIAVEWESNGQPENNYKTTPPVLDSDGSFFLYSKLTVDKSRWQQGNVFSCSVMHEALHNHYTQKSLSLSPGK

SEQ ID NO: 543 - protein, 450 aa, synthetic construct
QVQLVESGGGVVQPGRSLRLSCAASGFTFSNYGMHWVRQAPGEGLEWVAAIWFDASDKYYADSVKGRFTISRDNSKNTLYLQMNSLRAEDTAVYYCARDQAIFGVVPDYWGQGTLVTVSSASTKGPSVFPLAPSSKSTSGGTAALGCLVKDYFPEPVTVSWNSGALTSGVHTFPAVLQSSGLYSLSSVVTVPSSSLGTQTYICNVNHKPSNTKVDKKVEPKSCDKTHTCPPCPAPELLGGPSVFLFPPKPKDTLMISRTPEVTCVVVDVSHEDPEVKFNWYVDGVEVHNAKTKPCEEQYGSTYRCVSVLTVLHQDWLNGKEYKCKVSNKALPAPIEKTISKAKGQPREPQVYTLPPSREEMTKNQVSLTCLVKGFYPSDIAVEWESNGQPENNYKTTPPVLDSDGSFFLYSKLTVDKSRWQQGNVFSCSVMHEALHNHYTQKSLSLSPGK

SEQ ID NO: 544 - protein, 450 aa, synthetic construct
QVQLVESGGGVVQPGRSLRLSCAASGFTFSNYGMHWVRQAPGEGLEWVAAIWFDGSDKYYADAVKGRFTISRDNSKNTLYLQMNSLRAEDTAVYYCARDQAIFGVVPDYWGQGTLVTVSSASTKGPSVFPLAPSSKSTSGGTAALGCLVKDYFPEPVTVSWNSGALTSGVHTFPAVLQSSGLYSLSSVVTVPSSSLGTQTYICNVNHKPSNTKVDKKVEPKSCDKTHTCPPCPAPELLGGPSVFLFPPKPKDTLMISRTPEVTCVVVDVSHEDPEVKFNWYVDGVEVHNAKTKPCEEQYGSTYRCVSVLTVLHQDWLNGKEYKCKVSNKALPAPIEKTISKAKGQPREPQVYTLPPSREEMTKNQVSLTCLVKGFYPSDIAVEWESNGQPENNYKTTPPVLDSDGSFFLYSKLTVDKSRWQQGNVFSCSVMHEALHNHYTQKSLSLSPGK

SEQ ID NO: 545 - protein, 450 aa, synthetic construct; identical to SEQ ID NO: 542

SEQ ID NO: 546 - protein, 450 aa, synthetic construct
QVQLVESGGGVVQPGRSLRLSCAASGFTFSNYGMHWVRQAPGKGLEWVAAIWFDASDKYYADAVKGRFTISRDNSKNTLYLQMNSLRAEDTAVYYCARDQAIFGVVPDYWGQGTLVTVSSASTKGPSVFPLAPSSKSTSGGTAALGCLVKDYFPEPVTVSWNSGALTSGVHTFPAVLQSSGLYSLSSVVTVPSSSLGTQTYICNVNHKPSNTKVDKKVEPKSCDKTHTCPPCPAPELLGGPSVFLFPPKPKDTLMISRTPEVTCVVVDVSHEDPEVKFNWYVDGVEVHNAKTKPCEEQYGSTYRCVSVLTVLHQDWLNGKEYKCKVSNKALPAPIEKTISKAKGQPREPQVYTLPPSREEMTKNQVSLTCLVKGFYPSDIAVEWESNGQPENNYKTTPPVLDSDGSFFLYSKLTVDKSRWQQGNVFSCSVMHEALHNHYTQKSLSLSPGK

SEQ ID NO: 547 - protein, 450 aa, synthetic construct; identical to SEQ ID NO: 546

SEQ ID NO: 548 - protein, 450 aa, synthetic construct; identical to SEQ ID NO: 542

SEQ ID NO: 549 - protein, 450 aa, synthetic construct; identical to SEQ ID NO: 546

SEQ ID NO: 550 - protein, 456 aa, synthetic construct
QVQLQESGPGLVKPSETLSLTCTVSGDSISSGGYYWSWIRQPPGKGLEWIGYIYYSGSTYYNPSLKSRVTISVDTSKNQFSLKLSSVTAADTAVYYCARDRITIFGVVMGGGMDVWGQGTTVTVSSASTKGPSVFPLAPSSKSTSGGTAALGCLVKDYFPEPVTVSWNSGALTSGVHTFPAVLQSSGLYSLSSVVTVPSSSLGTQTYICNVNHKPSNTKVDKKVEPKSCDKTHTCPPCPAPELLGGPSVFLFPPKPKDTLMISRTPEVTCVVVDVSHEDPEVKFNWYVDGVEVHNAKTKPCEEQYGSTYRCVSVLTVLHQDWLNGKEYKCKVSNKALPAPIEKTISKAKGQPREPQVYTLPPSREEMTKNQVSLTCLVKGFYPSDIAVEWESNGQPENNYKTTPPVLDSDGSFFLYSKLTVDKSRWQQGNVFSCSVMHEALHNHYTQKSLSLSPGK

SEQ ID NO: 551 - protein, 456 aa, synthetic construct; identical to SEQ ID NO: 550

SEQ ID NO: 552 - protein, 456 aa, synthetic construct
QVQLQESGPGLVKPSQTLSLTCTVSGDSISSGGYYWSWIRQPPGKGLEWIGYIYYSGSTYYNPSLKSRVTISVDTSKNQFSLKLSSVTAADTAVYYCARDRITIFGVVMGGGMDVWGQGTTVTVSSASTKGPSVFPLAPSSKSTSGGTAALGCLVKDYFPEPVTVSWNSGALTSGVHTFPAVLQSSGLYSLSSVVTVPSSSLGTQTYICNVNHKPSNTKVDKKVEPKSCDKTHTCPPCPAPELLGGPSVFLFPPKPKDTLMISRTPEVTCVVVDVSHEDPEVKFNWYVDGVEVHNAKTKPCEEQYGSTYRCVSVLTVLHQDWLNGKEYKCKVSNKALPAPIEKTISKAKGQPREPQVYTLPPSREEMTKNQVSLTCLVKGFYPSDIAVEWESNGQPENNYKTTPPVLDSDGSFFLYSKLTVDKSRWQQGNVFSCSVMHEALHNHYTQKSLSLSPGK

SEQ ID NO: 553 - protein, 456 aa, synthetic construct
QVQLQESGPGLVKPSETLSLTCTVSGDSISSGGYYWSWIRQHPGKGLEWIGYIYYSGSTYYNPSLKSRVTISVDTSKNQFSLKLSSVTAADTAVYYCARDRITIFGVVMGGGMDVWGQGTTVTVSSASTKGPSVFPLAPSSKSTSGGTAALGCLVKDYFPEPVTVSWNSGALTSGVHTFPAVLQSSGLYSLSSVVTVPSSSLGTQTYICNVNHKPSNTKVDKKVEPKSCDKTHTCPPCPAPELLGGPSVFLFPPKPKDTLMISRTPEVTCVVVDVSHEDPEVKFNWYVDGVEVHNAKTKPCEEQYGSTYRCVSVLTVLHQDWLNGKEYKCKVSNKALPAPIEKTISKAKGQPREPQVYTLPPSREEMTKNQVSLTCLVKGFYPSDIAVEWESNGQPENNYKTTPPVLDSDGSFFLYSKLTVDKSRWQQGNVFSCSVMHEALHNHYTQKSLSLSPGK

SEQ ID NO: 554 - protein, 456 aa, synthetic construct; identical to SEQ ID NO: 480

SEQ ID NO: 555 - protein, 456 aa, synthetic construct; identical to SEQ ID NO: 553

SEQ ID NO: 556 - protein, 456 aa, synthetic construct; identical to SEQ ID NO: 552

SEQ ID NO: 557 - protein, 453 aa, synthetic construct
QVQLVQSGAEVKKPGASVKVSCKASGYTFTGYYIHWVRQAPGQGLEWMGWINPESGGTDYSQRFQGRVTMTRDTSISTAYMELNRLRSDDTAVYYCAREATIFGMVIVPFDYWGQGTLVTVSSASTKGPSVFPLAPSSKSTSGGTAALGCLVKDYFPEPVTVSWNSGALTSGVHTFPAVLQSSGLYSLSSVVTVPSSSLGTQTYICNVNHKPSNTKVDKKVEPKSCDKTHTCPPCPAPELLGGPSVFLFPPKPKDTLMISRTPEVTCVVVDVSHEDPEVKFNWYVDGVEVHNAKTKPCEEQYGSTYRCVSVLTVLHQDWLNGKEYKCKVSNKALPAPIEKTISKAKGQPREPQVYTLPPSREEMTKNQVSLTCLVKGFYPSDIAVEWESNGQPENNYKTTPPVLDSDGSFFLYSKLTVDKSRWQQGNVFSCSVMHEALHNHYTQKSLSLSPGK

SEQ ID NO: 558 - protein, 453 aa, synthetic construct
QVPLVQSGAEVKKPGASVKVSCKASGYTFTGYYIHWVRQAPGQGLEWMGWINPESGGTDYSQRFQGRFTMTRDTSISTAYMELNRLRSDDTAVYYCAREATIFGMVIVPFDYWGQGTLVTVSSASTKGPSVFPLAPSSKSTSGGTAALGCLVKDYFPEPVTVSWNSGALTSGVHTFPAVLQSSGLYSLSSVVTVPSSSLGTQTYICNVNHKPSNTKVDKKVEPKSCDKTHTCPPCPAPELLGGPSVFLFPPKPKDTLMISRTPEVTCVVVDVSHEDPEVKFNWYVDGVEVHNAKTKPCEEQYGSTYRCVSVLTVLHQDWLNGKEYKCKVSNKALPAPIEKTISKAKGQPREPQVYTLPPSREEMTKNQVSLTCLVKGFYPSDIAVEWESNGQPENNYKTTPPVLDSDGSFFLYSKLTVDKSRWQQGNVFSCSVMHEALHNHYTQKSLSLSPGK

SEQ ID NO: 559 - protein, 453 aa, synthetic construct
QVQLVQSGAEVKKPGASVKVSCKASGYTFTGYYIHWVRQAPGQGLEWMGWINPDAGGTDYSQRFQGRVTMTRDTSISTAYMELNRLRSDDTAVYYCAREATIFGMVIVPFDYWGQGTLVTVSSASTKGPSVFPLAPSSKSTSGGTAALGCLVKDYFPEPVTVSWNSGALTSGVHTFPAVLQSSGLYSLSSVVTVPSSSLGTQTYICNVNHKPSNTKVDKKVEPKSCDKTHTCPPCPAPELLGGPSVFLFPPKPKDTLMISRTPEVTCVVVDVSHEDPEVKFNWYVDGVEVHNAKTKPCEEQYGSTYRCVSVLTVLHQDWLNGKEYKCKVSNKALPAPIEKTISKAKGQPREPQVYTLPPSREEMTKNQVSLTCLVKGFYPSDIAVEWESNGQPENNYKTTPPVLDSDGSFFLYSKLTVDKSRWQQGNVFSCSVMHEALHNHYTQKSLSLSPGK

SEQ ID NO: 560 - protein, 453 aa, synthetic construct
QVPLVQSGAEVKKPGASVKVSCKASGYTFTGYYIHWVRQAPGQGLEWMGWINPDAGGTDYSQRFQGRFTMTRDTSISTAYMELNRLRSDDTAVYYCAREATIFGMVIVPFDYWGQGTLVTVSSASTKGPSVFPLAPSSKSTSGGTAALGCLVKDYFPEPVTVSWNSGALTSGVHTFPAVLQSSGLYSLSSVVTVPSSSLGTQTYICNVNHKPSNTKVDKKVEPKSCDKTHTCPPCPAPELLGGPSVFLFPPKPKDTLMISRTPEVTCVVVDVSHEDPEVKFNWYVDGVEVHNAKTKPCEEQYGSTYRCVSVLTVLHQDWLNGKEYKCKVSNKALPAPIEKTISKAKGQPREPQVYTLPPSREEMTKNQVSLTCLVKGFYPSDIAVEWESNGQPENNYKTTPPVLDSDGSFFLYSKLTVDKSRWQQGNVFSCSVMHEALHNHYTQKSLSLSPGK

SEQ ID NO: 561 - protein, 453 aa, synthetic construct
QVQLVQSGAEVKKPGASVKVSCKASGYTFTGYYIHWVRQAPGQGLEWMGWINPDSGGTDYSQRFQGRVTMTRDTSISTAYMELNRLRSDDTAVYYCAREATIFGMVIVPFDYWGQGTLVTVSSASTKGPSVFPLAPSSKSTSGGTAALGCLVKDYFPEPVTVSWNSGALTSGVHTFPAVLQSSGLYSLSSVVTVPSSSLGTQTYICNVNHKPSNTKVDKKVEPKSCDKTHTCPPCPAPELLGGPSVFLFPPKPKDTLMISRTPEVTCVVVDVSHEDPEVKFNWYVDGVEVHNAKTKPCEEQYGSTYRCVSVLTVLHQDWLNGKEYKCKVSNKALPAPIEKTISKAKGQPREPQVYTLPPSREEMTKNQVSLTCLVKGFYPSDIAVEWESNGQPENNYKTTPPVLDSDGSFFLYSKLTVDKSRWQQGNVFSCSVMHEALHNHYTQKSLSLSPGK

SEQ ID NO: 562 - protein, 453 aa, synthetic construct
QVQLVQSGAEVKKPGASVKVSCKASGYTFTGYYIHWVRQAPGQGLEWMGWINPDSGGTDYSQRFQGRFTMTRDTSISTAYMELNRLRSDDTAVYYCAREATIFGMVIVPFDYWGQGTLVTVSSASTKGPSVFPLAPSSKSTSGGTAALGCLVKDYFPEPVTVSWNSGALTSGVHTFPAVLQSSGLYSLSSVVTVPSSSLGTQTYICNVNHKPSNTKVDKKVEPKSCDKTHTCPPCPAPELLGGPSVFLFPPKPKDTLMISRTPEVTCVVVDVSHEDPEVKFNWYVDGVEVHNAKTKPCEEQYGSTYRCVSVLTVLHQDWLNGKEYKCKVSNKALPAPIEKTISKAKGQPREPQVYTLPPSREEMTKNQVSLTCLVKGFYPSDIAVEWESNGQPENNYKTTPPVLDSDGSFFLYSKLTVDKSRWQQGNVFSCSVMHEALHNHYTQKSLSLSPGK

SEQ ID NO: 563 - protein, 453 aa, synthetic construct
QVPLVQSGAEVKKPGASVKVSCKASGYTFTGYYIHWVRQAPGQGLEWMGWINPDSGGTDYSQRFQGRVTMTRDTSISTAYMELNRLRSDDTAVYYCAREATIFGMVIVPFDYWGQGTLVTVSSASTKGPSVFPLAPSSKSTSGGTAALGCLVKDYFPEPVTVSWNSGALTSGVHTFPAVLQSSGLYSLSSVVTVPSSSLGTQTYICNVNHKPSNTKVDKKVEPKSCDKTHTCPPCPAPELLGGPSVFLFPPKPKDTLMISRTPEVTCVVVDVSHEDPEVKFNWYVDGVEVHNAKTKPCEEQYGSTYRCVSVLTVLHQDWLNGKEYKCKVSNKALPAPIEKTISKAKGQPREPQVYTLPPSREEMTKNQVSLTCLVKGFYPSDIAVEWESNGQPENNYKTTPPVLDSDGSFFLYSKLTVDKSRWQQGNVFSCSVMHEALHNHYTQKSLSLSPGK

SEQ ID NO: 564 - protein, 453 aa, synthetic construct
QVQLVQSGAEVKKPGASVKVSCKASGYTFTGYYIHWVRQAPGQGLEWMGWINPDAGGTDYSQRFQGRFTMTRDTSISTAYMELNRLRSDDTAVYYCAREATIFGMVIVPFDYWGQGTLVTVSSASTKGPSVFPLAPSSKSTSGGTAALGCLVKDYFPEPVTVSWNSGALTSGVHTFPAVLQSSGLYSLSSVVTVPSSSLGTQTYICNVNHKPSNTKVDKKVEPKSCDKTHTCPPCPAPELLGGPSVFLFPPKPKDTLMISRTPEVTCVVVDVSHEDPEVKFNWYVDGVEVHNAKTKPCEEQYGSTYRCVSVLTVLHQDWLNGKEYKCKVSNKALPAPIEKTISKAKGQPREPQVYTLPPSREEMTKNQVSLTCLVKGFYPSDIAVEWESNGQPENNYKTTPPVLDSDGSFFLYSKLTVDKSRWQQGNVFSCSVMHEALHNHYTQKSLSLSPGK

SEQ ID NO: 565 - protein, 453 aa, synthetic construct
QVPLVQSGAEVKKPGASVKVSCKASGYTFTGYYIHWVRQAPGQGLEWMGWINPDAGGTDYSQRFQGRVTMTRDTSISTAYMELNRLRSDDTAVYYCAREATIFGMVIVPFDYWGQGTLVTVSSASTKGPSVFPLAPSSKSTSGGTAALGCLVKDYFPEPVTVSWNSGALTSGVHTFPAVLQSSGLYSLSSVVTVPSSSLGTQTYICNVNHKPSNTKVDKKVEPKSCDKTHTCPPCPAPELLGGPSVFLFPPKPKDTLMISRTPEVTCVVVDVSHEDPEVKFNWYVDGVEVHNAKTKPCEEQYGSTYRCVSVLTVLHQDWLNGKEYKCKVSNKALPAPIEKTISKAKGQPREPQVYTLPPSREEMTKNQVSLTCLVKGFYPSDIAVEWESNGQPENNYKTTPPVLDSDGSFFLYSKLTVDKSRWQQGNVFSCSVMHEALHNHYTQKSLSLSPGK

SEQ ID NO: 566 - protein, 453 aa, synthetic construct
QVQLVQSGAEVKKPGASVKVSCKASGYTFTGYYIHWVRQAPGQGLEWMGWINPDAGGTDYSQRFQGRVTMTRDTSISTAYMELNSLRSDDTAVYYCAREATIFGMVIVPFDYWGQGTLVTVSSASTKGPSVFPLAPSSKSTSGGTAALGCLVKDYFPEPVTVSWNSGALTSGVHTFPAVLQSSGLYSLSSVVTVPSSSLGTQTYICNVNHKPSNTKVDKKVEPKSCDKTHTCPPCPAPELLGGPSVFLFPPKPKDTLMISRTPEVTCVVVDVSHEDPEVKFNWYVDGVEVHNAKTKPCEEQYGSTYRCVSVLTVLHQDWLNGKEYKCKVSNKALPAPIEKTISKAKGQPREPQVYTLPPSREEMTKNQVSLTCLVKGFYPSDIAVEWESNGQPENNYKTTPPVLDSDGSFFLYSKLTVDKSRWQQGNVFSCSVMHEALHNHYTQKSLSLSPGK

SEQ ID NO: 567 - protein, 453 aa, synthetic construct
QVQLVQSGAEVKKPGASVKVSCKASGYTFTGYYIHWVRQAPGQGLEWMGWINPESGGTDYSQRFQGRVTMTRDTSISTAYMELNSLRSDDTAVYYCAREATIFGMVIVPFDYWGQGTLVTVSSASTKGPSVFPLAPSSKSTSGGTAALGCLVKDYFPEPVTVSWNSGALTSGVHTFPAVLQSSGLYSLSSVVTVPSSSLGTQTYICNVNHKPSNTKVDKKVEPKSCDKTHTCPPCPAPELLGGPSVFLFPPKPKDTLMISRTPEVTCVVVDVSHEDPEVKFNWYVDGVEVHNAKTKPCEEQYGSTYRCVSVLTVLHQDWLNGKEYKCKVSNKALPAPIEKTISKAKGQPREPQVYTLPPSREEMTKNQVSLTCLVKGFYPSDIAVEWESNGQPENNYKTTPPVLDSDGSFFLYSKLTVDKSRWQQGNVFSCSVMHEALHNHYTQKSLSLSPGK

SEQ ID NO: 568 - protein, 453 aa, synthetic construct
QVPLVQSGAEVKKPGASVKVSCKASGYTFTGYYIHWVRQAPGQGLVWMGWISPNSGETSYAQKFQDRVTMTRDTSISTAYMELSRLRSDDTAVYFCAREATIFGMLIVPFDYWGQGTLVTVSSASTKGPSVFPLAPSSKSTSGGTAALGCLVKDYFPEPVTVSWNSGALTSGVHTFPAVLQSSGLYSLSSVVTVPSSSLGTQTYICNVNHKPSNTKVDKKVEPKSCDKTHTCPPCPAPELLGGPSVFLFPPKPKDTLMISRTPEVTCVVVDVSHEDPEVKFNWYVDGVEVHNAKTKPCEEQYGSTYRCVSVLTVLHQDWLNGKEYKCKVSNKALPAPIEKTISKAKGQPREPQVYTLPPSREEMTKNQVSLTCLVKGFYPSDIAVEWESNGQPENNYKTTPPVLDSDGSFFLYSKLTVDKSRWQQGNVFSCSVMHEALHNHYTQKSLSLSPGK

SEQ ID NO: 569 - protein, 453 aa, synthetic construct
QVPLVQSGAEVKKPGASVKVSCKASGYTFTGYYIHWVRQAPGQGLVWMGWISPNSGDTSYAQKFQDRVTMTRDTSISTAYMELSRLRSDDTAVYFCAREATIFGMLIVPFDYWGQGTLVTVSSASTKGPSVFPLAPSSKSTSGGTAALGCLVKDYFPEPVTVSWNSGALTSGVHTFPAVLQSSGLYSLSSVVTVPSSSLGTQTYICNVNHKPSNTKVDKKVEPKSCDKTHTCPPCPAPELLGGPSVFLFPPKPKDTLMISRTPEVTCVVVDVSHEDPEVKFNWYVDGVEVHNAKTKPCEEQYGSTYRCVSVLTVLHQDWLNGKEYKCKVSNKALPAPIEKTISKAKGQPREPQVYTLPPSREEMTKNQVSLTCLVKGFYPSDIAVEWESNGQPENNYKTTPPVLDSDGSFFLYSKLTVDKSRWQQGNVFSCSVMHEALHNHYTQKSLSLSPGK

SEQ ID NO: 570 - protein, 453 aa, synthetic construct; identical to SEQ ID NO: 568

SEQ ID NO: 571 - protein, 453 aa, synthetic construct
QVPLVQSGAEVKKPGASVKVSCKASGYTFTGYYIHWVRQAPGQGLVWMGWISPNSGETSYAQKFQDRVTMTRDTSISTAYMELSRLRSDDTAVYFCTREATIFGMLIVPFDYWGQGTLVTVSSASTKGPSVFPLAPSSKSTSGGTAALGCLVKDYFPEPVTVSWNSGALTSGVHTFPAVLQSSGLYSLSSVVTVPSSSLGTQTYICNVNHKPSNTKVDKKVEPKSCDKTHTCPPCPAPELLGGPSVFLFPPKPKDTLMISRTPEVTCVVVDVSHEDPEVKFNWYVDGVEVHNAKTKPCEEQYGSTYRCVSVLTVLHQDWLNGKEYKCKVSNKALPAPIEKTISKAKGQPREPQVYTLPPSREEMTKNQVSLTCLVKGFYPSDIAVEWESNGQPENNYKTTPPVLDSDGSFFLYSKLTVDKSRWQQGNVFSCSVMHEALHNHYTQKSLSLSPGK

SEQ ID NO: 572 - protein, 453 aa, synthetic construct; identical to SEQ ID NO: 478

SEQ ID NO: 573 - protein, 453 aa, synthetic construct; identical to SEQ ID NO: 571

SEQ ID NO: 574 - protein, 453 aa, synthetic construct; identical to SEQ ID NO: 569

SEQ ID NO: 575 - protein, 453 aa, synthetic construct
QVQLVQSGAEVKKPGASVKVSCKASGYTFTGYYIHWVRQAPGQGLEWMGWISPNSGETSYAQKFQDRVTMTRDTSISTAYMELSSLRSDDTAVYFCAREATIFGMLIVPFDYWGQGTLVTVSSASTKGPSVFPLAPSSKSTSGGTAALGCLVKDYFPEPVTVSWNSGALTSGVHTFPAVLQSSGLYSLSSVVTVPSSSLGTQTYICNVNHKPSNTKVDKKVEPKSCDKTHTCPPCPAPELLGGPSVFLFPPKPKDTLMISRTPEVTCVVVDVSHEDPEVKFNWYVDGVEVHNAKTKPCEEQYGSTYRCVSVLTVLHQDWLNGKEYKCKVSNKALPAPIEKTISKAKGQPREPQVYTLPPSREEMTKNQVSLTCLVKGFYPSDIAVEWESNGQPENNYKTTPPVLDSDGSFFLYSKLTVDKSRWQQGNVFSCSVMHEALHNHYTQKSLSLSPGK

SEQ ID NO: 576 - protein, 453 aa, synthetic construct
QVQLVQSGAEVKKPGASVKVSCKASGYTFTGYYIHWVRQAPGQGLEWMGWISPNSGETSYAQKFQDRVTMTRDTSISTAYMELSRLRSDDTAVYFCAREATIFGMLIVPFDYWGQGTLVTVSSASTKGPSVFPLAPSSKSTSGGTAALGCLVKDYFPEPVTVSWNSGALTSGVHTFPAVLQSSGLYSLSSVVTVPSSSLGTQTYICNVNHKPSNTKVDKKVEPKSCDKTHTCPPCPAPELLGGPSVFLFPPKPKDTLMISRTPEVTCVVVDVSHEDPEVKFNWYVDGVEVHNAKTKPCEEQYGSTYRCVSVLTVLHQDWLNGKEYKCKVSNKALPAPIEKTISKAKGQPREPQVYTLPPSREEMTKNQVSLTCLVKGFYPSDIAVEWESNGQPENNYKTTPPVLDSDGSFFLYSKLTVDKSRWQQGNVFSCSVMHEALHNHYTQKSLSLSPGK

SEQ ID NO: 577 - protein, 453 aa, synthetic construct
QVPLVQSGAEVKKPGASVKVSCKASGYTFTGYYIHWVRQAPGQGLEWMGWINPESGGTDYSQRFQGRVTMTRDTSISTAYMELSRLRSDDTAVYYCAREATIFGMVIVPFDYWGQGTLVTVSSASTKGPSVFPLAPSSKSTSGGTAALGCLVKDYFPEPVTVSWNSGALTSGVHTFPAVLQSSGLYSLSSVVTVPSSSLGTQTYICNVNHKPSNTKVDKKVEPKSCDKTHTCPPCPAPELLGGPSVFLFPPKPKDTLMISRTPEVTCVVVDVSHEDPEVKFNWYVDGVEVHNAKTKPCEEQYGSTYRCVSVLTVLHQDWLNGKEYKCKVSNKALPAPIEKTISKAKGQPREPQVYTLPPSREEMTKNQVSLTCLVKGFYPSDIAVEWESNGQPENNYKTTPPVLDSDGSFFLYSKLTVDKSRWQQGNVFSCSVMHEALHNHYTQKSLSLSPGK

SEQ ID NO: 578 - protein, 453 aa, synthetic construct
QVPLVQSGAEVKKPGASVKVSCKASGYTFTGYYIHWVRQAPGQGLEWMGWINPESGGTDYSQRFQGRFTMTRDTSISTAYMELSRLRSDDTAVYYCAREATIFGMVIVPFDYWGQGTLVTVSSASTKGPSVFPLAPSSKSTSGGTAALGCLVKDYFPEPVTVSWNSGALTSGVHTFPAVLQSSGLYSLSSVVTVPSSSLGTQTYICNVNHKPSNTKVDKKVEPKSCDKTHTCPPCPAPELLGGPSVFLFPPKPKDTLMISRTPEVTCVVVDVSHEDPEVKFNWYVDGVEVHNAKTKPCEEQYGSTYRCVSVLTVLHQDWLNGKEYKCKVSNKALPAPIEKTISKAKGQPREPQVYTLPPSREEMTKNQVSLTCLVKGFYPSDIAVEWESNGQPENNYKTTPPVLDSDGSFFLYSKLTVDKSRWQQGNVFSCSVMHEALHNHYTQKSLSLSPGK

SEQ ID NO: 579 - protein, 453 aa, synthetic construct
QVPLVQSGAEVKKPGASVKVSCKASGYTFTGYYIHWVRQAPGQGLEWMGWINPDSGGTDYSQRFQGRVTMTRDTSISTAYMELSRLRSDDTAVYYCAREATIFGMVIVPFDYWGQGTLVTVSSASTKGPSVFPLAPSSKSTSGGTAALGCLVKDYFPEPVTVSWNSGALTSGVHTFPAVLQSSGLYSLSSVVTVPSSSLGTQTYICNVNHKPSNTKVDKKVEPKSCDKTHTCPPCPAPELLGGPSVFLFPPKPKDTLMISRTPEVTCVVVDVSHEDPEVKFNWYVDGVEVHNAKTKPCEEQYGSTYRCVSVLTVLHQDWLNGKEYKCKVSNKALPAPIEKTISKAKGQPREPQVYTLPPSREEMTKNQVSLTCLVKGFYPSDIAVEWESNGQPENNYKTTPPVLDSDGSFFLYSKLTVDKSRWQQGNVFSCSVMHEALHNHYTQKSLSLSPGK

SEQ ID NO: 580 - protein, 453 aa, synthetic construct
QVQLVQSGAEVKKPGASVKVSCKASGYTFTGYYIHWVRQAPGQGLEWMGWINPESGGTDYSQRFQGRVTMTRDTSISTAYMELSSLRSDDTAVYYCAREATIFGMVIVPFDYWGQGTLVTVSSASTKGPSVFPLAPSSKSTSGGTAALGCLVKDYFPEPVTVSWNSGALTSGVHTFPAVLQSSGLYSLSSVVTVPSSSLGTQTYICNVNHKPSNTKVDKKVEPKSCDKTHTCPPCPAPELLGGPSVFLFPPKPKDTLMISRTPEVTCVVVDVSHEDPEVKFNWYVDGVEVHNAKTKPCEEQYGSTYRCVSVLTVLHQDWLNGKEYKCKVSNKALPAPIEKTISKAKGQPREPQVYTLPPSREEMTKNQVSLTCLVKGFYPSDIAVEWESNGQPENNYKTTPPVLDSDGSFFLYSKLTVDKSRWQQGNVFSCSVMHEALHNHYTQKSLSLSPGK

SEQ ID NO: 581 - protein, 453 aa, synthetic construct; identical to SEQ ID NO: 577

SEQ ID NO: 582 - protein, 453 aa, synthetic construct
QVPLVQSGAEVKKPGASVKVSCKASGYTFTGYYIHWVRQAPGQGLEWMGWISPNQGETNYAQKFQDRVTMTRDTSISTAYMELSRLRSDDTAVYYCAREATIFGMLIVPFDYWGQGTLVTVSSASTKGPSVFPLAPSSKSTSGGTAALGCLVKDYFPEPVTVSWNSGALTSGVHTFPAVLQSSGLYSLSSVVTVPSSSLGTQTYICNVNHKPSNTKVDKKVEPKSCDKTHTCPPCPAPELLGGPSVFLFPPKPKDTLMISRTPEVTCVVVDVSHEDPEVKFNWYVDGVEVHNAKTKPCEEQYGSTYRCVSVLTVLHQDWLNGKEYKCKVSNKALPAPIEKTISKAKGQPREPQVYTLPPSREEMTKNQVSLTCLVKGFYPSDIAVEWESNGQPENNYKTTPPVLDSDGSFFLYSKLTVDKSRWQQGNVFSCSVMHEALHNHYTQKSLSLSPGK

SEQ ID NO: 583 - protein, 453 aa, synthetic construct
QVPLVQSGAEVKKPGASVKVSCKASGYTFTGYYIHWVRQAPGQGLEWMGWISPNQGDTNYAQKFQDRVTMTRDTSISTAYMELSRLRSDDTAVYYCAREATIFGMLIVPFDYWGQGTLVTVSSASTKGPSVFPLAPSSKSTSGGTAALGCLVKDYFPEPVTVSWNSGALTSGVHTFPAVLQSSGLYSLSSVVTVPSSSLGTQTYICNVNHKPSNTKVDKKVEPKSCDKTHTCPPCPAPELLGGPSVFLFPPKPKDTLMISRTPEVTCVVVDVSHEDPEVKFNWYVDGVEVHNAKTKPCEEQYGSTYRCVSVLTVLHQDWLNGKEYKCKVSNKALPAPIEKTISKAKGQPREPQVYTLPPSREEMTKNQVSLTCLVKGFYPSDIAVEWESNGQPENNYKTTPPVLDSDGSFFLYSKLTVDKSRWQQGNVFSCSVMHEALHNHYTQKSLSLSPGK

SEQ ID NO: 584 - protein, 453 aa, synthetic construct
QVPLVQSGAEVKKPGASVKVSCKASGYTFTGYYIHWVRQAPGQGLEWMGWISPNQGETNYAQKFQDRVTMTRDTSISTAYMELSRLRSDDTAVYYCTREATIFGMLIVPFDYWGQGTLVTVSSASTKGPSVFPLAPSSKSTSGGTAALGCLVKDYFPEPVTVSWNSGALTSGVHTFPAVLQSSGLYSLSSVVTVPSSSLGTQTYICNVNHKPSNTKVDKKVEPKSCDKTHTCPPCPAPELLGGPSVFLFPPKPKDTLMISRTPEVTCVVVDVSHEDPEVKFNWYVDGVEVHNAKTKPCEEQYGSTYRCVSVLTVLHQDWLNGKEYKCKVSNKALPAPIEKTISKAKGQPREPQVYTLPPSREEMTKNQVSLTCLVKGFYPSDIAVEWESNGQPENNYKTTPPVLDSDGSFFLYSKLTVDKSRWQQGNVFSCSVMHEALHNHYTQKSLSLSPGK

SEQ ID NO: 585 - protein, 453 aa, synthetic construct
QVPLVQSGAEVKKPGASVKVSCKASGYTFTGYYIHWVRQAPGQGLEWMGWISPNNGETNYAQKFQDRVTMTRDTSISTAYMELSRLRSDDTAVYYCAREATIFGMLIVPFDYWGQGTLVTVSSASTKGPSVFPLAPSSKSTSGGTAALGCLVKDYFPEPVTVSWNSGALTSGVHTFPAVLQSSGLYSLSSVVTVPSSSLGTQTYICNVNHKPSNTKVDKKVEPKSCDKTHTCPPCPAPELLGGPSVFLFPPKPKDTLMISRTPEVTCVVVDVSHEDPEVKFNWYVDGVEVHNAKTKPCEEQYGSTYRCVSVLTVLHQDWLNGKEYKCKVSNKALPAPIEKTISKAKGQPREPQVYTLPPSREEMTKNQVSLTCLVKGFYPSDIAVEWESNGQPENNYKTTPPVLDSDGSFFLYSKLTVDKSRWQQGNVFSCSVMHEALHNHYTQKSLSLSPGK

SEQ ID NO: 586 - protein, 453 aa, synthetic construct
QVPLVQSGAEVKKPGASVKVSCKASGYTFTGYYIHWVRQAPGQGLEWMGWISPNNGDTNYAQKFQDRVTMTRDTSISTAYMELSRLRSDDTAVYYCAREATIFGMLIVPFDYWGQGTLVTVSSASTKGPSVFPLAPSSKSTSGGTAALGCLVKDYFPEPVTVSWNSGALTSGVHTFPAVLQSSGLYSLSSVVTVPSSSLGTQTYICNVNHKPSNTKVDKKVEPKSCDKTHTCPPCPAPELLGGPSVFLFPPKPKDTLMISRTPEVTCVVVDVSHEDPEVKFNWYVDGVEVHNAKTKPCEEQYGSTYRCVSVLTVLHQDWLNGKEYKCKVSNKALPAPIEKTISKAKGQPREPQVYTLPPSREEMTKNQVSLTCLVKGFYPSDIAVEWESNGQPENNYKTTPPVLDSDGSFFLYSKLTVDKSRWQQGNVFSCSVMHEALHNHYTQKSLSLSPGK

SEQ ID NO: 587 - protein, 453 aa, synthetic construct
QVPLVQSGAEVKKPGASVKVSCKASGYTFTGYYIHWVRQAPGQGLEWMGWISPNQGDTNYAQKFQDRVTMTRDTSISTAYMELSRLRSDDTAVYYCTREATIFGMLIVPFDYWGQGTLVTVSSASTKGPSVFPLAPSSKSTSGGTAALGCLVKDYFPEPVTVSWNSGALTSGVHTFPAVLQSSGLYSLSSVVTVPSSSLGTQTYICNVNHKPSNTKVDKKVEPKSCDKTHTCPPCPAPELLGGPSVFLFPPKPKDTLMISRTPEVTCVVVDVSHEDPEVKFNWYVDGVEVHNAKTKPCEEQYGSTYRCVSVLTVLHQDWLNGKEYKCKVSNKALPAPIEKTISKAKGQPREPQVYTLPPSREEMTKNQVSLTCLVKGFYPSDIAVEWESNGQPENNYKTTPPVLDSDGSFFLYSKLTVDKSRWQQGNVFSCSVMHEALHNHYTQKSLSLSPGK

SEQ ID NO: 588 - protein, 453 aa, synthetic construct
QVPLVQSGAEVKKPGASVKVSCKASGYTFTGYYIHWVRQAPGQGLEWMGWISPNNGETNYAQKFQDRVTMTRDTSISTAYMELSRLRSDDTAVYYCTREATIFGMLIVPFDYWGQGTLVTVSSASTKGPSVFPLAPSSKSTSGGTAALGCLVKDYFPEPVTVSWNSGALTSGVHTFPAVLQSSGLYSLSSVVTVPSSSLGTQTYICNVNHKPSNTKVDKKVEPKSCDKTHTCPPCPAPELLGGPSVFLFPPKPKDTLMISRTPEVTCVVVDVSHEDPEVKFNWYVDGVEVHNAKTKPCEEQYGSTYRCVSVLTVLHQDWLNGKEYKCKVSNKALPAPIEKTISKAKGQPREPQVYTLPPSREEMTKNQVSLTCLVKGFYPSDIAVEWESNGQPENNYKTTPPVLDSDGSFFLYSKLTVDKSRWQQGNVFSCSVMHEALHNHYTQKSLSLSPGK

SEQ ID NO: 589 - protein, 453 aa, synthetic construct; identical to SEQ ID NO: 582

SEQ ID NO: 590 - protein, 453 aa, synthetic construct; identical to SEQ ID NO: 586

SEQ ID NO: 591 - protein, 453 aa, synthetic construct; identical to SEQ ID NO: 583

SEQ ID NO: 592 - protein, 453 aa, synthetic construct; identical to SEQ ID NO: 585

SEQ ID NO: 593 - protein, 453 aa, synthetic construct
QVQLVQSGAEVKKPGASVKVSCKASGYTFTGYYIHWVRQAPGQGLEWMGWISPNQGETNYAQKFQDRVTMTRDTSISTAYMELSSLRSDDTAVYYCAREATIFGMLIVPFDYWGQGTLVTVSSASTKGPSVFPLAPSSKSTSGGTAALGCLVKDYFPEPVTVSWNSGALTSGVHTFPAVLQSSGLYSLSSVVTVPSSSLGTQTYICNVNHKPSNTKVDKKVEPKSCDKTHTCPPCPAPELLGGPSVFLFPPKPKDTLMISRTPEVTCVVVDVSHEDPEVKFNWYVDGVEVHNAKTKPCEEQYGSTYRCVSVLTVLHQDWLNGKEYKCKVSNKALPAPIEKTISKAKGQPREPQVYTLPPSREEMTKNQVSLTCLVKGFYPSDIAVEWESNGQPENNYKTTPPVLDSDGSFFLYSKLTVDKSRWQQGNVFSCSVMHEALHNHYTQKSLSLSPGK

SEQ ID NO: 594 - protein, 453 aa, synthetic construct; identical to SEQ ID NO: 593

SEQ ID NO: 595 - protein, 458 aa, synthetic construct; identical to SEQ ID NO: 472

SEQ ID NO: 596 - protein, 458 aa, synthetic construct; identical to SEQ ID NO: 472

SEQ ID NO: 597 - protein, 458 aa, synthetic construct; identical to SEQ ID NO: 472

SEQ ID NO: 598 - protein, 458 aa, synthetic construct; identical to SEQ ID NO: 472

SEQ ID NO: 599 - protein, 458 aa, synthetic construct; identical to SEQ ID NO: 472

SEQ ID NO: 600 - protein, 458 aa, synthetic construct; identical to SEQ ID NO: 472

SEQ ID NO: 601 - protein, 458 aa, synthetic construct; identical to SEQ ID NO: 472

SEQ ID NO: 602 - protein, 458 aa, synthetic construct; identical to SEQ ID NO: 472

SEQ ID NO: 603 - protein, 458 aa, synthetic construct; identical to SEQ ID NO: 472

SEQ ID NO: 604 - protein, 458 aa, synthetic construct; identical to SEQ ID NO: 472

SEQ ID NO: 605 - protein, 458 aa, synthetic construct; identical to SEQ ID NO: 472

SEQ ID NO: 606 - protein, 458 aa, synthetic construct; identical to SEQ ID NO: 472

SEQ ID NO: 607 - protein, 458 aa, synthetic construct
QMQVVQSGAEVKKPGASVKVSCKASGYTFTGYYMHWVRQAPGQGLEWMGWINPNSGGTNYAQKFQGRVTMTRDTSISTAYMELSSLRSDDTAVYYCARGGDYVFGTYRPHYYYGMDVWGQGTTVTVSSASTKGPSVFPLAPSSKSTSGGTAALGCLVKDYFPEPVTVSWNSGALTSGVHTFPAVLQSSGLYSLSSVVTVPSSSLGTQTYICNVNHKPSNTKVDKKVEPKSCDKTHTCPPCPAPELLGGPSVFLFPPKPKDTLMISRTPEVTCVVVDVSHEDPEVKFNWYVDGVEVHNAKTKPCEEQYGSTYRCVSVLTVLHQDWLNGKEYKCKVSNKALPAPIEKTISKAKGQPREPQVYTLPPSREEMTKNQVSLTCLVKGFYPSDIAVEWESNGQPENNYKTTPPVLDSDGSFFLYSKLTVDKSRWQQGNVFSCSVMHEALHNHYTQKSLSLSPGK

SEQ ID NO: 608 - protein, 458 aa, synthetic construct
QMQVVQSGAEVKKPGASVKVSCKASGYTFTGYYMHWVRQAPGQGLEWMGWINPNSGGTNYAQKFQGRVTMTRDTSISTAYMELSRLRSDDTAVYYCARGGDYVFGTYRPHYYYGMDVWGQGTTVTVSSASTKGPSVFPLAPSSKSTSGGTAALGCLVKDYFPEPVTVSWNSGALTSGVHTFPAVLQSSGLYSLSSVVTVPSSSLGTQTYICNVNHKPSNTKVDKKVEPKSCDKTHTCPPCPAPELLGGPSVFLFPPKPKDTLMISRTPEVTCVVVDVSHEDPEVKFNWYVDGVEVHNAKTKPCEEQYGSTYRCVSVLTVLHQDWLNGKEYKCKVSNKALPAPIEKTISKAKGQPREPQVYTLPPSREEMTKNQVSLTCLVKGFYPSDIAVEWESNGQPENNYKTTPPVLDSDGSFFLYSKLTVDKSRWQQGNVFSCSVMHEALHNHYTQKSLSLSPGK

SEQ ID NO: 609 - protein, 451 aa, synthetic construct; identical to SEQ ID NO: 509

SEQ ID NO: 610 - protein, 451 aa, synthetic construct; identical to SEQ ID NO: 491

SEQ ID NO: 611 - protein, 458 aa, synthetic construct; identical to SEQ ID NO: 472

SEQ ID NO: 612 - protein, 451 aa, synthetic construct
QVQLVESGGGVVQPGRSLRLSCTASGFTFSSYGIHWVRQAPGKGLEWVAVIWYDGSNKFHADSVKGRFTISRDNSKNTLYLQMNSLRAEDSAMYFCARGKVAGMPEAFEIWGQGTKVTVSSASTKGPSVFPLAPSSKSTSGGTAALGCLVKDYFPEPVTVSWNSGALTSGVHTFPAVLQSSGLYSLSSVVTVPSSSLGTQTYICNVNHKPSNTKVDKKVEPKSCDKTHTCPPCPAPELLGGPSVFLFPPKPKDTLMISRTPEVTCVVVDVSHEDPEVKFNWYVDGVEVHNAKTKPCEEQYGSTYRCVSVLTVLHQDWLNGKEYKCKVSNKALPAPIEKTISKAKGQPREPQVYTLPPSREEMTKNQVSLTCLVKGFYPSDIAVEWESNGQPENNYKTTPPVLDSDGSFFLYSKLTVDKSRWQQGNVFSCSVMHEALHNHYTQKSLSLSPGK

SEQ ID NO: 613 - protein, 459 aa, synthetic construct
QMQLVQSGAEVKKPGASVKVSCKASGYTFTSYDINWVRQATGQGLEWMGWMNPNSGNTGYAQKFQGRVTMTRDTSISTAYMELSSLRSQDTAVYYCARGGDYVWGSYRPYYYYYGMDVWGQGTTVTVSSASTKGPSVFPLAPSSKSTSGGTAALGCLVKDYFPEPVTVSWNSGALTSGVHTFPAVLQSSGLYSLSSVVTVPSSSLGTQTYICNVNHKPSNTKVDKKVEPKSCDKTHTCPPCPAPELLGGPSVFLFPPKPKDTLMISRTPEVTCVVVDVSHEDPEVKFNWYVDGVEVHNAKTKPCEEQYGSTYRCVSVLTVLHQDWLNGKEYKCKVSNKALPAPIEKTISKAKGQPREPQVYTLPPSREEMTKNQVSLTCLVKGFYPSDIAVEWESNGQPENNYKTTPPVLDSDGSFFLYSKLTVDKSRWQQGNVFSCSVMHEALHNHYTQKSLSLSPGK

SEQ ID NO: 614 - protein, 451 aa, synthetic construct
QVQLVESGGGVVQPGRSLRLSCAASGFTFSSYGIHWVRQAPGKGLEWVAVIWYDASNKFHADAVKGRFTISRDNSKNTLYLQMNSLRAEDSAMYFCARGKVAGMPEAFEIWGQGTKVTVSSASTKGPSVFPLAPSSKSTSGGTAALGCLVKDYFPEPVTVSWNSGALTSGVHTFPAVLQSSGLYSLSSVVTVPSSSLGTQTYICNVNHKPSNTKVDKKVEPKSCDKTHTCPPCPAPELLGGPSVFLFPPKPKDTLMISRTPEVTCVVVDVSHEDPEVKFNWYVDGVEVHNAKTKPCEEQYGSTYRCVSVLTVLHQDWLNGKEYKCKVSNKALPAPIEKTISKAKGQPREPQVYTLPPSREEMTKNQVSLTCLVKGFYPSDIAVEWESNGQPENNYKTTPPVLDSDGSFFLYSKLTVDKSRWQQGNVFSCSVMHEALHNHYTQKSLSLSPGK

SEQ ID NO: 615 - protein, 451 aa, synthetic construct
QVQLVESGGGVVQPGRSLRLSCTASGFTFSSYGIHWVRQAPGKGLEWVAVIWYDASNKFHADAVKGRFTISRDNSKNTLYLQMNSLRAEDSAMYFCARGKVAGMPEAFEIWGQGTKVTVSSASTKGPSVFPLAPSSKSTSGGTAALGCLVKDYFPEPVTVSWNSGALTSGVHTFPAVLQSSGLYSLSSVVTVPSSSLGTQTYICNVNHKPSNTKVDKKVEPKSCDKTHTCPPCPAPELLGGPSVFLFPPKPKDTLMISRTPEVTCVVVDVSHEDPEVKFNWYVDGVEVHNAKTKPCEEQYGSTYRCVSVLTVLHQDWLNGKEYKCKVSNKALPAPIEKTISKAKGQPREPQVYTLPPSREEMTKNQVSLTCLVKGFYPSDIAVEWESNGQPENNYKTTPPVLDSDGSFFLYSKLTVDKSRWQQGNVFSCSVMHEALHNHYTQKSLSLSPGK

SEQ ID NO: 616 - protein, 451 aa, synthetic construct; identical to SEQ ID NO: 614

SEQ ID NO: 617 - protein, 451 aa, synthetic construct
QVQLVESGGGVVQPGRSLRLSCAASGFTFSSYGIHWVRQAPGKGLEWVAVIWYDASNKFHADAVKGRFTISRDNSKNTLYLQMNSLRAEDSAMYFCARGKVAGMPEAFEIWGQGTLVTVSSASTKGPSVFPLAPSSKSTSGGTAALGCLVKDYFPEPVTVSWNSGALTSGVHTFPAVLQSSGLYSLSSVVTVPSSSLGTQTYICNVNHKPSNTKVDKKVEPKSCDKTHTCPPCPAPELLGGPSVFLFPPKPKDTLMISRTPEVTCVVVDVSHEDPEVKFNWYVDGVEVHNAKTKPCEEQYGSTYRCVSVLTVLHQDWLNGKEYKCKVSNKALPAPIEKTISKAKGQPREPQVYTLPPSREEMTKNQVSLTCLVKGFYPSDIAVEWESNGQPENNYKTTPPVLDSDGSFFLYSKLTVDKSRWQQGNVFSCSVMHEALHNHYTQKSLSLSPGK

SEQ ID NO: 618 - protein, 451 aa, synthetic construct
QVQLVESGGGVVQPGRSLRLSCAASGFTFSSYGIHWVRQAPGKGLEWVAVIWYDASNKFHADSVKGRFTISRDNSKNTLYLQMNSLRAEDSAMYFCARGKVAGMPEAFEIWGQGTKVTVSSASTKGPSVFPLAPSSKSTSGGTAALGCLVKDYFPEPVTVSWNSGALTSGVHTFPAVLQSSGLYSLSSVVTVPSSSLGTQTYICNVNHKPSNTKVDKKVEPKSCDKTHTCPPCPAPELLGGPSVFLFPPKPKDTLMISRTPEVTCVVVDVSHEDPEVKFNWYVDGVEVHNAKTKPCEEQYGSTYRCVSVLTVLHQDWLNGKEYKCKVSNKALPAPIEKTISKAKGQPREPQVYTLPPSREEMTKNQVSLTCLVKGFYPSDIAVEWESNGQPENNYKTTPPVLDSDGSFFLYSKLTVDKSRWQQGNVFSCSVMHEALHNHYTQKSLSLSPGK

SEQ ID NO: 619 - protein, 451 aa, synthetic construct
QVQLVESGGGVVQPGRSLRLSCAASGFTFSSYGIHWVRQAPGKGLEWVAVIWYDGSNKFHADAVKGRFTISRDNSKNTLYLQMNSLRAEDSAMYFCARGKVAGMPEAFEIWGQGTKVTVSSASTKGPSVFPLAPSSKSTSGGTAALGCLVKDYFPEPVTVSWNSGALTSGVHTFPAVLQSSGLYSLSSVVTVPSSSLGTQTYICNVNHKPSNTKVDKKVEPKSCDKTHTCPPCPAPELLGGPSVFLFPPKPKDTLMISRTPEVTCVVVDVSHEDPEVKFNWYVDGVEVHNAKTKPCEEQYGSTYRCVSVLTVLHQDWLNGKEYKCKVSNKALPAPIEKTISKAKGQPREPQVYTLPPSREEMTKNQVSLTCLVKGFYPSDIAVEWESNGQPENNYKTTPPVLDSDGSFFLYSKLTVDKSRWQQGNVFSCSVMHEALHNHYTQKSLSLSPGK

SEQ ID NO: 620 - protein, 459 aa, synthetic construct
QMQLVQSGAEVKKPGASVKVSCKASGYTFTSYDINWVRQATGQGLEWMGWMNPNSGGTGYAQKFQGRVTMTRDTSISTAYMELSSLRSQDTAVYYCARGGDYVWGSYRPYYYYYGMDVWGQGTTVTVSSASTKGPSVFPLAPSSKSTSGGTAALGCLVKDYFPEPVTVSWNSGALTSGVHTFPAVLQSSGLYSLSSVVTVPSSSLGTQTYICNVNHKPSNTKVDKKVEPKSCDKTHTCPPCPAPELLGGPSVFLFPPKPKDTLMISRTPEVTCVVVDVSHEDPEVKFNWYVDGVEVHNAKTKPCEEQYGSTYRCVSVLTVLHQDWLNGKEYKCKVSNKALPAPIEKTISKAKGQPREPQVYTLPPSREEMTKNQVSLTCLVKGFYPSDIAVEWESNGQPENNYKTTPPVLDSDGSFFLYSKLTVDKSRWQQGNVFSCSVMHEALHNHYTQKSLSLSPGK

SEQ ID NO: 621 - protein, 459 aa, synthetic construct; identical to SEQ ID NO: 613

SEQ ID NO: 622 - protein, 459 aa, synthetic construct; identical to SEQ ID NO: 620

SEQ ID NO: 623 - protein, 459 aa, synthetic construct
QMQLVQSGAEVKKPGASVKVSCKASGYTFTSYDINWVRQAPGQGLEWMGWMNPNSGGTGYAQKFQGRVTMTRDTSISTAYMELSSLRSDDTAVYYCARGGDYVWGSYRPYYYYYGMDVWGQGTTVTVSSASTKGPSVFPLAPSSKSTSGGTAALGCLVKDYFPEPVTVSWNSGALTSGVHTFPAVLQSSGLYSLSSVVTVPSSSLGTQTYICNVNHKPSNTKVDKKVEPKSCDKTHTCPPCPAPELLGGPSVFLFPPKPKDTLMISRTPEVTCVVVDVSHEDPEVKFNWYVDGVEVHNAKTKPCEEQYGSTYRCVSVLTVLHQDWLNGKEYKCKVSNKALPAPIEKTISKAKGQPREPQVYTLPPSREEMTKNQVSLTCLVKGFYPSDIAVEWESNGQPENNYKTTPPVLDSDGSFFLYSKLTVDKSRWQQGNVFSCSVMHEALHNHYTQKSLSLSPGK

SEQ ID NO: 624 - protein, 459 aa, synthetic construct; identical to SEQ ID NO: 620

SEQ ID NO: 625 - protein, 459 aa, synthetic construct
QMQLVQSGAEVKKPGASVKVSCKASGYTFTSYDINWVRQAPGQGLEWMGWMNPNSGNTGYAQKFQGRVTMTRDTSISTAYMELSSLRSDDTAVYYCARGGDYVWGSYRPYYYYYGMDVWGQGTTVTVSSASTKGPSVFPLAPSSKSTSGGTAALGCLVKDYFPEPVTVSWNSGALTSGVHTFPAVLQSSGLYSLSSVVTVPSSSLGTQTYICNVNHKPSNTKVDKKVEPKSCDKTHTCPPCPAPELLGGPSVFLFPPKPKDTLMISRTPEVTCVVVDVSHEDPEVKFNWYVDGVEVHNAKTKPCEEQYGSTYRCVSVLTVLHQDWLNGKEYKCKVSNKALPAPIEKTISKAKGQPREPQVYTLPPSREEMTKNQVSLTCLVKGFYPSDIAVEWESNGQPENNYKTTPPVLDSDGSFFLYSKLTVDKSRWQQGNVFSCSVMHEALHNHYTQKSLSLSPGK

SEQ ID NO: 626 - protein, 459 aa, synthetic construct
QMQLVQSGAEVKKPGASVKVSCKASGYTFTSYDINWVRQATGQGLEWMGWMNPNSGGTGYAQKFQGRVTMTRDTSISTAYMELSSLRSQDTAVYYCARGGDYVFGSYRPYYYYYGMDVWGQGTTVTVSSASTKGPSVFPLAPSSKSTSGGTAALGCLVKDYFPEPVTVSWNSGALTSGVHTFPAVLQSSGLYSLSSVVTVPSSSLGTQTYICNVNHKPSNTKVDKKVEPKSCDKTHTCPPCPAPELLGGPSVFLFPPKPKDTLMISRTPEVTCVVVDVSHEDPEVKFNWYVDGVEVHNAKTKPCEEQYGSTYRCVSVLTVLHQDWLNGKEYKCKVSNKALPAPIEKTISKAKGQPREPQVYTLPPSREEMTKNQVSLTCLVKGFYPSDIAVEWESNGQPENNYKTTPPVLDSDGSFFLYSKLTVDKSRWQQGNVFSCSVMHEALHNHYTQKSLSLSPGK

SEQ ID NO: 627 - protein, 459 aa, synthetic construct
QMQLVQSGAEVKKPGASVKVSCKASGYTFTSYDINWVRQAPGQGLEWMGWMNPNSGGTGYAQKFQGRVTMTRDTSISTAYMELSSLRSDDTAVYYCARGGDYVFGSYRPYYYYYGMDVWGQGTTVTVSSASTKGPSVFPLAPSSKSTSGGTAALGCLVKDYFPEPVTVSWNSGALTSGVHTFPAVLQSSGLYSLSSVVTVPSSSLGTQTYICNVNHKPSNTKVDKKVEPKSCDKTHTCPPCPAPELLGGPSVFLFPPKPKDTLMISRTPEVTCVVVDVSHEDPEVKFNWYVDGVEVHNAKTKPCEEQYGSTYRCVSVLTVLHQDWLNGKEYKCKVSNKALPAPIEKTISKAKGQPREPQVYTLPPSREEMTKNQVSLTCLVKGFYPSDIAVEWESNGQPENNYKTTPPVLDSDGSFFLYSKLTVDKSRWQQGNVFSCSVMHEALHNHYTQKSLSLSPGK

SEQ ID NO: 628 - protein, 451 aa, synthetic construct; identical to SEQ ID NO: 617

SEQ ID NO: 629 - protein, 13 aa, synthetic construct
SGSSSNIGSNTVN

SEQ ID NO: 630 - protein, 11 aa, synthetic construct
RASQDIRDYLG

SEQ ID NO: 631 - protein, 11 aa, synthetic construct
RASQDIRDYLG

SEQ ID NO: 632 - protein, 11 aa, synthetic construct
QASQDISNYLN

SEQ ID NO: 633 - protein, 17 aa, synthetic construct
KSSQSVLSSSNNKNYIA

SEQ ID NO: 634 - protein, 17 aa, synthetic construct
KSSQSVLSSSNNKNYIA

SEQ ID NO: 635 - protein, 17 aa, synthetic construct
KSSQSVLSSSNNKNYLA

SEQ ID NO: 636 - protein, 17 aa, synthetic construct
KSSQSVLSSSNNKNYLA

SEQ ID NO: 637 - protein, 12 aa, synthetic construct
RASQSISYSYLA

SEQ ID NO: 638 - protein, 11 aa, synthetic construct
RASQSVSSNLA

SEQ ID NO: 639 - protein, 11 aa, synthetic construct
RASQGIRNELG

SEQ ID NO: 640 - protein, 11 aa, synthetic construct
QASQDITNYLN

SEQ ID NO: 641 - protein, 11 aa, synthetic construct
RASQGLIIWLA

SEQ ID NO: 642 - protein, 11 aa, synthetic construct
RASQGLIIWLA

SEQ ID NO: 643 - protein, 11 aa, synthetic construct
RASQGIRNELG

SEQ ID NO: 644 - protein, 11 aa, synthetic construct
RASQGIRNELG

SEQ ID NO: 645 - protein, 11 aa, synthetic construct
RASQGIRNELG

SEQ ID NO: 646 - protein, 11 aa, synthetic construct
RASQGIRNELG

SEQ ID NO: 647 - protein, 11 aa, synthetic construct
RASQGIRNELG

SEQ ID NO: 648 - protein, 11 aa, synthetic construct
RASQGIRNELG

SEQ ID NO: 649 - protein, 11 aa, synthetic construct
RASQDIRDYLG

SEQ ID NO: 650 - protein, 11 aa, synthetic construct
RASQDIRDYLG

SEQ ID NO: 651 - protein, 11 aa, synthetic construct
RASQDIRDYLG

SEQ ID NO: 652 - protein, 11 aa, synthetic construct
RASQDIRDYLG

SEQ ID NO: 653 - protein, 11 aa, synthetic construct
RASQDIRDYLG

SEQ ID NO: 654 - protein, 11 aa, synthetic construct
RASQDIRDYLG

SEQ ID NO: 655 - protein, 11 aa, synthetic construct
RASQDIRDYLG

SEQ ID NO: 656 - protein, 11 aa, synthetic construct
RASQDLRNYLG

SEQ ID NO: 657 - protein, 11 aa, synthetic construct
RASQDLRNYLG

SEQ ID NO: 658 - protein, 11 aa, synthetic construct
RASQDLRNYLG

SEQ ID NO: 659 - protein, 11 aa, synthetic construct
RASQDLRNYLG

SEQ ID NO: 660 - protein, 11 aa, synthetic construct
RASQDLRNYLG

SEQ ID NO: 661 - protein, 11 aa, synthetic construct
RASQDLRNYLG

SEQ ID NO: 662 - protein, 11 aa, synthetic construct
RASQDLRNYLG

SEQ ID NO: 663 - protein, 11 aa, synthetic construct
RASQDLRNYLG

SEQ ID NO: 664 - protein, 11 aa, synthetic construct
RASQDLRNYLG

SEQ ID NO: 665 - protein, 11 aa, synthetic construct
RASQDLRNYLG

SEQ ID NO: 666 - protein, 11 aa, synthetic construct
RASQDLRNYLG

SEQ ID NO: 667 - protein, 11 aa, synthetic construct
RASQDLRNYLG

SEQ ID NO: 668 - protein, 11 aa, synthetic construct
QASQDISNYLN

SEQ ID NO: 669 - protein, 11 aa, synthetic construct
QASQDISNYLN

SEQ ID NO: 670 - protein, 11 aa, synthetic construct
QASQDISNYLN

SEQ ID NO: 671 - protein, 11 aa, synthetic construct
QASQDISNYLN

SEQ ID NO: 672 - protein, 11 aa, synthetic construct
QASQDISNYLN

SEQ ID NO: 673 - protein, 11 aa, synthetic construct
QASQDISNYLN

SEQ ID NO: 674 - protein, 11 aa, synthetic construct
QASQDISNYLN

SEQ ID NO: 675 - protein, 11 aa, synthetic construct
QASQDISNYLN

SEQ ID NO: 676 - protein, 11 aa, synthetic construct
QASQDISNYLN

SEQ ID NO: 677 - protein, 11 aa, synthetic construct
RASQDIRDYLG

SEQ ID NO: 678 - protein, 11 aa, synthetic construct
RASQDIRDYLG

SEQ ID NO: 679 - protein, 11 aa, synthetic construct
RASQDIRDYLG

SEQ ID NO: 680 - protein, 11 aa, synthetic construct
RASQDIRDYLG

SEQ ID NO: 681 - protein, 11 aa, synthetic construct
RASQDIRDYLG

SEQ ID NO: 682 - protein, 11 aa, synthetic construct
RASQDIRDYLG

SEQ ID NO: 683 - protein, 11 aa, synthetic construct
RASQDIRDYLG

SEQ ID NO: 684 - protein, 11 aa, synthetic construct
QASQDITNYLN

SEQ ID NO: 685 - protein, 11 aa, synthetic construct
QASQDITNYLN

SEQ ID NO: 686 - protein, 11 aa, synthetic construct
QASQDITNYLN

SEQ ID NO: 687 - protein, 11 aa, synthetic construct
QASQDITNYLN

SEQ ID NO: 688 - protein, 11 aa, synthetic construct
QASQDITNYLN

SEQ ID NO: 689 - protein, 11 aa, synthetic construct
QASQDITNYLN

SEQ ID NO: 690 - protein, 11 aa, synthetic construct
QASQDITNYLN

SEQ ID NO: 691 - protein, 11 aa, synthetic construct
QASQDITNYLN

SEQ ID NO: 692 - protein, 11 aa, synthetic construct
QASQDITNYLN

SEQ ID NO: 693 - protein, 11 aa, synthetic construct
QASQDITNYLN

SEQ ID NO: 694 - protein, 11 aa, synthetic construct
QASQDITNYLN

SEQ ID NO: 695 - protein, 12 aa, synthetic construct
RASQIFTSTYLA

SEQ ID NO: 696 - protein, 12 aa, synthetic construct
RASQIFTSTYLA

SEQ ID NO: 697 - protein, 12 aa, synthetic construct
RASQIFTSTYLA

SEQ ID NO: 698 - protein, 12 aa, synthetic construct
RASQIFTSTYLA

SEQ ID NO: 699 - protein, 11 aa, synthetic construct
RASQSVSSNLA

SEQ ID NO: 700 - protein, 11 aa, synthetic construct
RASQSVSSNLA

SEQ ID NO: 701 - protein, 11 aa, synthetic construct
RASQSVSSNLA

SEQ ID NO: 702 - protein, 11 aa, synthetic construct
RASQSVSSNLA

SEQ ID NO: 703 - protein, 11 aa, synthetic construct
RASQSVSSNLA

SEQ ID NO: 704 - protein, 11 aa, synthetic construct
RASQSVSSNLA

SEQ ID NO: 705 - protein, 11 aa, synthetic construct
RASQSVSSNLA

SEQ ID NO: 706 - protein, 11 aa, synthetic construct
RASQSVSSNLA

SEQ ID NO: 707 - protein, 12 aa, synthetic construct
RASQSISYSYLA

SEQ ID NO: 708 - protein, 12 aa, synthetic construct
RASQSISYSYLA

SEQ ID NO: 709 - protein, 12 aa, synthetic construct
RASQSISYSYLA

SEQ ID NO: 710 - protein, 12 aa, synthetic construct
RASQSISYSYLA

SEQ ID NO: 711 - protein, 12 aa, synthetic construct
RASQSISYSYLA

SEQ ID NO: 712 - protein, 12 aa, synthetic construct
RASQSISYSYLA

SEQ ID NO: 713 - protein, 12 aa, synthetic construct
RASQSISYSYLA

SEQ ID NO: 714 - protein, 17 aa, synthetic construct
KSSQSVLSSSNNKNYIA

SEQ ID NO: 715 - protein, 17 aa, synthetic construct
KSSQSVLSSSNNKNYIA

SEQ ID NO: 716 - protein, 17 aa, synthetic construct
KSSQSVLSSSNNKNYIA

SEQ ID NO: 717 - protein, 17 aa, synthetic construct
KSSQSVLSSSNNKNYIA

SEQ ID NO: 718 - protein, 17 aa, synthetic construct
KSSQSVLSSSNNKNYIA

SEQ ID NO: 719 - protein, 17 aa, synthetic construct
KSSQSVLSSSNNKNYIA

SEQ ID NO: 720 - protein, 17 aa, synthetic construct
KSSQSVLSSSNNKNYIA

SEQ ID NO: 721 - protein, 17 aa, synthetic construct
KSSQSVLSSSNNKNYIA

SEQ ID NO: 722 - protein, 17 aa, synthetic construct
KSSQSVLSSSNNKNYIA

SEQ ID NO: 723 - protein, 17 aa, synthetic construct
KSSQSVLSSSNNKNYIA

SEQ ID NO: 724 - protein, 17 aa, synthetic construct
KSSQSVLSSSNNKNYIA

SEQ ID NO: 725 - protein, 17 aa, synthetic construct
KSSQSVLSSSNNKNYLA

SEQ ID NO: 726 - protein, 17 aa, synthetic construct
KSSQSVLSSSNNKNYLA

SEQ ID NO: 727 - protein, 17 aa, synthetic construct
KSSQSVLSSSNNKNYLA

SEQ ID NO: 728 - protein, 17 aa, synthetic construct
KSSQSVLSSSNNKNYLA

SEQ ID NO: 729 - protein, 17 aa, synthetic construct
KSSQSVLSSSNNKNYLA

SEQ ID NO: 730 - protein, 17 aa, synthetic construct
KSSQSVLSSSNNKNYLA

SEQ ID NO: 731 - protein, 17 aa, synthetic construct
KSSQSVLSSSNNKNYLA

SEQ ID NO: 732 - protein, 17 aa, synthetic construct
KSSQSVLSSSNNKNYLA

SEQ ID NO: 733 - protein, 17 aa, synthetic construct
KSSQSVLSSSNNKNYLA

SEQ ID NO: 734 - protein, 17 aa, synthetic construct
KSSQSVLSSSNNKNYIA

SEQ ID NO: 735 - protein, 17 aa, synthetic construct
KSSQSVLSSSNNKNYIA

SEQ ID NO: 736 - protein, 17 aa, synthetic construct
KSSQSVLSSSNNKNYIA

SEQ ID NO: 737 - protein, 17 aa, synthetic construct
KSSQSVLSSSNNKNYIA

SEQ ID NO: 738 - protein, 17 aa, synthetic construct
KSSQSVLSSSNNKNYIA

SEQ ID NO: 739 - protein, 17 aa, synthetic construct
KSSQSVLSSSNNKNYLA

SEQ ID NO: 740 - protein, 17 aa, synthetic construct
KSSQSVLSSSNNKNYLA

SEQ ID NO: 741 - protein, 17 aa, synthetic construct
KSSQSVLSSSNNKNYLA

SEQ ID NO: 742 - protein, 17 aa, synthetic construct
KSSQSVLSSSNNKNYLA

SEQ ID NO: 743 - protein, 17 aa, synthetic construct
KSSQSVLSSSNNKNYLA

SEQ ID NO: 744 - protein, 17 aa, synthetic construct
KSSQSVLSSSNNKNYLA

SEQ ID NO: 745 - protein, 17 aa, synthetic construct
KSSQSVLSSSNNKNYLA

SEQ ID NO: 746 - protein, 17 aa, synthetic construct
KSSQSVLSSSNNKNYLA

SEQ ID NO: 747 - protein, 17 aa, synthetic construct
KSSQSVLSSSNNKNYLA

SEQ ID NO: 748 - protein, 17 aa, synthetic construct
KSSQSVLSSSNNKNYLA

SEQ ID NO: 749 - protein, 17 aa, synthetic construct
KSSQSVLSSSNNKNYLA

SEQ ID NO: 750 - protein, 17 aa, synthetic construct
KSSQSVLSSSNNKNYLA

SEQ ID NO: 751 - protein, 17 aa, synthetic construct
KSSQSVLSSSNNKNYLA

SEQ ID NO: 752 - protein, 13 aa, synthetic construct
SGSSSNIGSQTVN

SEQ ID NO: 753 - protein, 13 aa, synthetic construct
SGSSSNIGSQTVN

SEQ ID NO: 754 - protein, 13 aa, synthetic construct
SGSSSNIGSNYVN

SEQ ID NO: 755 - protein, 13 aa, synthetic construct
SGSSSNIGSNYVN

SEQ ID NO: 756 - protein, 13 aa, synthetic construct
SGSSSNIGSQTVN

SEQ ID NO: 757 - protein, 13 aa, synthetic construct
SGSSSNIGSNYVN

SEQ ID NO: 758 - protein, 13 aa, synthetic construct
SGSSSNIGSNTVN

SEQ ID NO: 759 - protein, 13 aa, synthetic construct
SGSSSNIGSNTVN

SEQ ID NO: 760 - protein, 13 aa, synthetic construct
SGSSSNIGSNTVN

SEQ ID NO: 761 - protein, 13 aa, synthetic construct
SGSSSNIGSNTVN

SEQ ID NO: 762 - protein, 13 aa, synthetic construct
SGSSSNIGSNTVN

SEQ ID NO: 763 - protein, 13 aa, synthetic construct
SGSSSNIGSNYVN

SEQ ID NO: 764 - protein, 13 aa, synthetic construct
SGSSSNIGSNYVN

SEQ ID NO: 765 - protein, 13 aa, synthetic construct
SGSSSNIGSQTVN

SEQ ID NO: 766 - protein, 11 aa, synthetic construct
RASQDLRNYLG

SEQ ID NO: 767 - protein, 11 aa, synthetic construct
RASQDIRDYLG

SEQ ID NO: 768 - protein, 13 aa, synthetic construct
SGSSSNIGSNTVN

SEQ ID NO: 769 - protein, 11 aa, synthetic construct
RASQTISRFLN

SEQ ID NO: 770 - protein, 13 aa, synthetic construct
SGSSSNIGNNYVS

SEQ ID NO: 771 - protein, 11 aa, synthetic construct
RASQTISRFLN

SEQ ID NO: 772 - protein, 11 aa, synthetic construct
RASQTISRFLN

SEQ ID NO: 773 - protein, 11 aa, synthetic construct
RASQTISRFLN

SEQ ID NO: 774 - protein, 11 aa, synthetic construct
RASQTISRFLN

SEQ ID NO: 775 - protein, 11 aa, synthetic construct
RASQTISRFLN

SEQ ID NO: 776 - protein, 11 aa, synthetic construct
RASQTISRFLN

SEQ ID NO: 777 - protein, 13 aa, synthetic construct
SGSSSNIGNNYVS

SEQ ID NO: 778 - protein, 13 aa, synthetic construct
SGSSSNIGNNYVS

SEQ ID NO: 779 - protein, 13 aa, synthetic construct
SGSSSNIGNNYVS

SEQ ID NO: 780 - protein, 13 aa, synthetic construct
SGSSSNIGNNYVS

SEQ ID NO: 781 - protein, 13 aa, synthetic construct
SGSSSNIGNNYVS

SEQ ID NO: 782 - protein, 13 aa, synthetic construct
SGSSSNIGNNYVS

SEQ ID NO: 783 - protein, 13 aa, synthetic construct
SGSSSNIGNNYVS

SEQ ID NO: 784 - protein, 13 aa, synthetic construct
SGSSSNIGNNYVS

SEQ ID NO: 785 - protein, 11 aa, synthetic construct
RASQTISRFLN

SEQ ID NO: 786 - protein, 7 aa, synthetic construct
TNNQRPS

SEQ ID NO: 787 - protein, 7 aa, synthetic construct
GASSLQS

SEQ ID NO: 788 - protein, 7 aa, synthetic construct
GASSLQS

SEQ ID NO: 789 - protein, 7 aa, synthetic construct
DASNLET

SEQ ID NO: 790 - protein, 7 aa, synthetic construct
WASTRES

SEQ ID NO: 791 - protein, 7 aa, synthetic construct
WASTRES

SEQ ID NO: 792 - protein, 7 aa, synthetic construct
WTSTRDS

SEQ ID NO: 793 - protein, 7 aa, synthetic construct
WTSTRDS

SEQ ID NO: 794 - protein, 7 aa, synthetic construct
GASSRAT

SEQ ID NO: 795 - protein, 7 aa, synthetic construct
GAATRAT

SEQ ID NO: 796 - protein, 7 aa, synthetic construct
GASSLQS

SEQ ID NO: 797 - protein, 7 aa, synthetic construct
DASNLEP

SEQ ID NO: 798 - protein, 7 aa, synthetic construct
AASSLQS

SEQ ID NO: 799 - protein, 7 aa, synthetic construct
AASSLQS

SEQ ID NO: 800 - protein, 7 aa, synthetic construct
GASSLQS

SEQ ID NO: 801 - protein, 7 aa, synthetic construct
GASSLQS

SEQ ID NO: 802 - protein, 7 aa, synthetic construct
GASSLQS

SEQ ID NO: 803 - protein, 7 aa, synthetic construct
GASSLQS

SEQ ID NO: 804 - protein, 7 aa, synthetic construct
GASSLQS

SEQ ID NO: 805 - protein, 7 aa, synthetic construct
GASSLQS

SEQ ID NO: 806 - protein, 7 aa, synthetic construct
GASSLQS

SEQ ID NO: 807 - protein, 7 aa, synthetic construct
GASSLQS

SEQ ID NO: 808 - protein, 7 aa, synthetic construct
GASSLQS

SEQ ID NO: 809 - protein, 7 aa, synthetic construct
GASSLQS

SEQ ID NO: 810 - protein, 7 aa, synthetic construct
GASSLQS

SEQ ID NO: 811 - protein, 7 aa, synthetic construct
GASSLQS

SEQ ID NO: 812 - protein, 7 aa, synthetic construct
GASSLQS

SEQ ID NO: 813 - protein, 7 aa, synthetic construct
GASSLQS

SEQ ID NO: 814 - protein, 7 aa, synthetic construct
GASSLQS

SEQ ID NO: 815 - protein, 7 aa, synthetic construct
GASSLQS

SEQ ID NO: 816 - protein, 7 aa, synthetic construct
GASSLQS

SEQ ID NO: 817 - protein, 7 aa, synthetic construct
GASSLQS

SEQ ID NO: 818 - protein, 7 aa, synthetic construct
GASSLQS

SEQ ID NO: 819 - protein, 7 aa, synthetic construct
GASSLQS

SEQ ID NO: 820 - protein, 7 aa, synthetic construct
GASSLQS

SEQ ID NO: 821 - protein, 7 aa, synthetic construct
GASSLQS

SEQ ID NO: 822 - protein, 7 aa, synthetic construct
GASSLQS

SEQ ID NO: 823 - protein, 7 aa, synthetic construct
GASSLQS

SEQ ID NO: 824 - protein, 7 aa, synthetic construct
GASSLQS

SEQ ID NO: 825 - protein, 7 aa, synthetic construct
DASNLET

SEQ ID NO: 826 - protein, 7 aa, synthetic construct
DASNLET

SEQ ID NO: 827 - protein, 7 aa, synthetic construct
DASNLET

SEQ ID NO: 828 - protein, 7 aa, synthetic construct
DASNLET

SEQ ID NO: 829 - protein, 7 aa, synthetic construct
DASNLET

SEQ ID NO: 830 - protein, 7 aa, synthetic construct
DASNLET

SEQ ID NO: 831 - protein, 7 aa, synthetic construct
DASNLET

SEQ ID NO: 832 - protein, 7 aa, synthetic construct
DASNLET

SEQ ID NO: 833 - protein, 7 aa, synthetic construct
DASNLET

SEQ ID NO: 834 - protein, 7 aa, synthetic construct
GASSLQS

SEQ ID NO: 835 - protein, 7 aa, synthetic construct
GASSLQS

SEQ ID NO: 836 - protein, 7 aa, synthetic construct
GASSLQS

SEQ ID NO: 837 - protein, 7 aa, synthetic construct
GASSLQS

SEQ ID NO: 838 - protein, 7 aa, synthetic construct
GASSLQS

SEQ ID NO: 839 - protein, 7 aa, synthetic construct
GASSLQS

SEQ ID NO: 840 - protein, 7 aa, synthetic construct
GASSLQS

SEQ ID NO: 841 - protein, 7 aa, synthetic construct
DASNLEP

SEQ ID NO: 842 - protein, 7 aa, synthetic construct
DASNLEP

SEQ ID NO: 843 - protein, 7 aa, synthetic construct
DASNLEP

SEQ ID NO: 844 - protein, 7 aa, synthetic construct
DASNLEP

SEQ ID NO: 845 - protein, 7 aa, synthetic construct
DASNLEP

SEQ ID NO: 846 - protein, 7 aa, synthetic construct
DASNLEP

SEQ ID NO: 847 - protein, 7 aa, synthetic construct
DASNLEP

SEQ ID NO: 848 - protein, 7 aa, synthetic construct
DASNLEP

SEQ ID NO: 849 - protein, 7 aa, synthetic construct
DASNLEP

SEQ ID NO: 850 - protein, 7 aa, synthetic construct
DASNLEP

SEQ ID NO: 851 - protein, 7 aa, synthetic construct
DASNLEP

SEQ ID NO: 852 - protein, 7 aa, synthetic construct
GASSRAT

SEQ ID NO: 853 - protein, 7 aa, synthetic construct
GASSRAT

SEQ ID NO: 854 - protein, 7 aa, synthetic construct
GASSRAT

SEQ ID NO: 855 - protein, 7 aa, synthetic construct
GASSRAT

SEQ ID NO: 856 - protein, 7 aa, synthetic construct
GAATRAT

SEQ ID NO: 857 - protein, 7 aa, synthetic construct
GAATRAT

SEQ ID NO: 858 - protein, 7 aa, synthetic construct
GAATRAT

SEQ ID NO: 859 - protein, 7 aa, synthetic construct
GAATRAT

SEQ ID NO: 860 - protein, 7 aa, synthetic construct
GAATRAT

SEQ ID NO: 861 - protein, 7 aa, synthetic construct
GAATRAT

SEQ ID NO: 862 - protein, 7 aa, synthetic construct
GAATRAT

SEQ ID NO: 863 - protein, 7 aa, synthetic construct
GAATRAT

SEQ ID NO: 864 - protein, 7 aa, synthetic construct
GASSRAT

SEQ ID NO: 865 - protein, 7 aa, synthetic construct
GASSRAT

SEQ ID NO: 866 - protein, 7 aa, synthetic construct
GASSRAT

SEQ ID NO: 867 - protein, 7 aa, synthetic construct
GASSRAT

SEQ ID NO: 868 - protein, 7 aa, synthetic construct
GASSRAT

SEQ ID NO: 869 - protein, 7 aa, synthetic construct
GASSRAT

SEQ ID NO: 870 - protein, 7 aa, synthetic construct
GASSRAT

SEQ ID NO: 871 - protein, 7 aa, synthetic construct
WASTRES

SEQ ID NO: 872 - protein, 7 aa, synthetic construct
WASTRES

SEQ ID NO: 873 - protein, 7 aa, synthetic construct
WASTRES

SEQ ID NO: 874 - protein, 7 aa, synthetic construct
WASTRES

SEQ ID NO: 875 - protein, 7 aa, synthetic construct
WASTRES

SEQ ID NO: 876 - protein, 7 aa, synthetic construct
WASTRES

SEQ ID NO: 877 - protein, 7 aa, synthetic construct
WASTRES

SEQ ID NO: 878 - protein, 7 aa, synthetic construct
WASTRES

SEQ ID NO: 879 - protein, 7 aa, synthetic construct
WASTRES

SEQ ID NO: 880 - protein, 7 aa, synthetic construct
WASTRES

SEQ ID NO: 881 - protein, 7 aa, synthetic construct
WASTRES

SEQ ID NO: 882 - protein, 7 aa, synthetic construct
WTSTRES

SEQ ID NO: 883 - protein, 7 aa, synthetic construct
WTSTRES

SEQ ID NO: 884 - protein, 7 aa, synthetic construct
WTSTRDS

SEQ ID NO: 885 - protein, 7 aa, synthetic construct
WTSTRES

SEQ ID NO: 886 - protein, 7 aa, synthetic construct
WTSTRES

SEQ ID NO: 887 - protein, 7 aa, synthetic construct
WTSTRDS

SEQ ID NO: 888 - protein, 7 aa, synthetic construct
WTSTRDS

SEQ ID NO: 889 - protein, 7 aa, synthetic construct
WTSTRES

SEQ ID NO: 890 - protein, 7 aa, synthetic construct
WTSTRES

SEQ ID NO: 891 - protein, 7 aa, synthetic construct
WASTRES

SEQ ID NO: 892 - protein, 7 aa, synthetic construct
WASTRES

SEQ ID NO: 893 - protein, 7 aa, synthetic construct
WASTRES

SEQ ID NO: 894 - protein, 7 aa, synthetic construct
WASTRES

SEQ ID NO: 895 - protein, 7 aa, synthetic construct
WASTRES

SEQ ID NO: 896 - protein, 7 aa, synthetic construct
WTSTRDS

SEQ ID NO: 897 - protein, 7 aa, synthetic construct
WTSTRDS

SEQ ID NO: 898 - protein, 7 aa, synthetic construct
WTSTRDS

SEQ ID NO: 899 - protein, 7 aa, synthetic construct
WTSTRDS

SEQ ID NO: 900 - protein, 7 aa, synthetic construct
WTSTRDS

SEQ ID NO: 901 - protein, 7 aa, synthetic construct
WTSTRDS

SEQ ID NO: 902 - protein, 7 aa, synthetic construct
WTSTRDS

SEQ ID NO: 903 - protein, 7 aa, synthetic construct
WTSTRES

SEQ ID NO: 904 - protein, 7 aa, synthetic construct
WTSTRES

SEQ ID NO: 905 - protein, 7 aa, synthetic construct
WTSTRES

SEQ ID NO: 906 - protein, 7 aa, synthetic construct
WTSTRES

SEQ ID NO: 907 - protein, 7 aa, synthetic construct
WTSTRDS

SEQ ID NO: 908 - protein, 7 aa, synthetic construct
WTSTRES

SEQ ID NO: 909 - protein, 7 aa, synthetic construct
TNNQRPS

SEQ ID NO: 910 - protein, 7 aa, synthetic construct
TNNQRPS

SEQ ID NO: 911 - protein, 7 aa, synthetic construct
TNNQRPS

SEQ ID NO: 912 - protein, 7 aa, synthetic construct
TNNQRPS

SEQ ID NO: 913 - protein, 7 aa, synthetic construct
TNNQRPS

SEQ ID NO: 914 - protein, 7 aa, synthetic construct
TNNQRPS

SEQ ID NO: 915 - protein, 7 aa, synthetic construct
TNNQRPS

SEQ ID NO: 916 - protein, 7 aa, synthetic construct
TNNQRPS

SEQ ID NO: 917 - protein, 7 aa, synthetic construct
TNNQRPS

SEQ ID NO: 918 - protein, 7 aa, synthetic construct
TNNQRPS

SEQ ID NO: 919 - protein, 7 aa, synthetic construct
TNNQRPS

SEQ ID NO: 920 - protein, 7 aa, synthetic construct
TNNQRPS

SEQ ID NO: 921 - protein, 7 aa, synthetic construct
TNNQRPS

SEQ ID NO: 922 - protein, 7 aa, synthetic construct
TNNQRPS

SEQ ID NO: 923 - protein, 7 aa, synthetic construct
GASSLQS

SEQ ID NO: 924 - protein, 7 aa, synthetic construct
GASSLQS

SEQ ID NO: 925 - protein, 7 aa, synthetic construct
TNNQRPS

SEQ ID NO: 926 - protein, 7 aa, synthetic construct
VASSLQS

SEQ ID NO: 927 - protein, 7 aa, synthetic construct
DNNKRPS

SEQ ID NO: 928 - protein, 7 aa, synthetic construct
VASSLQS

SEQ ID NO: 929 - protein, 7 aa, synthetic construct
VASSLQS

SEQ ID NO: 930 - protein, 7 aa, synthetic construct
VASSLQS

SEQ ID NO: 931 - protein, 7 aa, synthetic construct
VASSLQS

SEQ ID NO: 932 - protein, 7 aa, synthetic construct
VASSLQS

SEQ ID NO: 933 - protein, 7 aa, synthetic construct
VASSLQS

SEQ ID NO: 934 - protein, 7 aa, synthetic construct
DNNKRPS

SEQ ID NO: 935 - protein, 7 aa, synthetic construct
DNNKRPS

SEQ ID NO: 936 - protein, 7 aa, synthetic construct
DNNKRPS

SEQ ID NO: 937 - protein, 7 aa, synthetic construct
DNNKRPS

SEQ ID NO: 938 - protein, 7 aa, synthetic construct
DNNKRPS

SEQ ID NO: 939 - protein, 7 aa, synthetic construct
DNNKRPS

SEQ ID NO: 940 - protein, 7 aa, synthetic construct
DNNKRPS

SEQ ID NO: 941 - protein, 7 aa, synthetic construct
DNNKRPS

SEQ ID NO: 942 - protein, 7 aa, synthetic construct
VASSLQS

SEQ ID NO: 943 - protein, 11 aa, synthetic construct
ATFDDSLNGPV

SEQ ID NO: 944 - protein, 9 aa, synthetic construct
LQHNNYPFT

SEQ ID NO: 945 - protein, 9 aa, synthetic construct
LQHNNYPFT

SEQ ID NO: 946 - protein, 8 aa, synthetic construct
QQYDILLT

SEQ ID NO: 947 - protein, 9 aa, synthetic construct
QQYYSTPWT

SEQ ID NO: 948 - protein, 9 aa, synthetic construct
QQYYSTPWT

SEQ ID NO: 949 - protein, 9 aa, synthetic construct
QQYYRTPWT

SEQ ID NO: 950 - protein, 9 aa, synthetic construct
QQYYRTPWT

SEQ ID NO: 951 - protein, 9 aa, synthetic construct
QQYGSSPLT

SEQ ID NO: 952 - protein, 9 aa, synthetic construct
QQYNNWPLT

SEQ ID NO: 953 - protein, 9 aa, synthetic construct
LQHNSYPFT

SEQ ID NO: 954 - protein, 8 aa, synthetic construct
QQYDDLFT

SEQ ID NO: 955 - protein, 9 aa, synthetic construct
QQTNSFPPT

SEQ ID NO: 956 - protein, 9 aa, synthetic construct
QQTNSFPPT

SEQ ID NO: 957 - protein, 9 aa, synthetic construct
LQHNSYPFT

SEQ ID NO: 958 - protein, 9 aa, synthetic construct
LQHNSYPFT

SEQ ID NO: 959 - protein, 9 aa, synthetic construct
LQHNSYPFT

SEQ ID NO: 960 - protein, 9 aa, synthetic construct
LQHNSYPFT

SEQ ID NO: 961 - protein, 9 aa, synthetic construct
LQHNSYPFT

SEQ ID NO: 962 - protein, 9 aa, synthetic construct
LQHNSYPFT

SEQ ID NO: 963 - protein, 9 aa, synthetic construct
LQHNNYPFT

SEQ ID NO: 964 - protein, 9 aa, synthetic construct
LQHNNYPFT

SEQ ID NO: 965 - protein, 9 aa, synthetic construct
LQHNNYPFT

SEQ ID NO: 966 - protein, 9 aa, synthetic construct
LQHNNYPFT

SEQ ID NO: 967 - protein, 9 aa, synthetic construct
LQHNNYPFT

SEQ ID NO: 968 - protein, 9 aa, synthetic construct
LQHNNYPFT

SEQ ID NO: 969 - protein, 9 aa, synthetic construct
LQHNNYPFT

SEQ ID NO: 970 - protein, 9 aa, synthetic construct
LQHNNYPFT

SEQ ID NO: 971 - protein, 9 aa, synthetic construct
LQHNNYPFT

SEQ ID NO: 972 - protein, 9 aa, synthetic construct
LQHNNYPFT

SEQ ID NO: 973 - protein, 9 aa, synthetic construct
LQHNNYPFT

SEQ ID NO: 974 - protein, 9 aa, synthetic construct
LQHNNYPFT

SEQ ID NO: 975 - protein, 9 aa, synthetic construct
LQHNNYPFT

SEQ ID NO: 976 - protein, 9 aa, synthetic construct
LQHNNYPFT

SEQ ID NO: 977 - protein, 9 aa, synthetic construct
LQHNNYPFT

SEQ ID NO: 978 - protein, 9 aa, synthetic construct
LQHNNYPFT

SEQ ID NO: 979 - protein, 9 aa, synthetic construct
LQHNNYPFT

SEQ ID NO: 980 - protein, 9 aa, synthetic construct
LQHNNYPFT

SEQ ID NO: 981 - protein, 9 aa, synthetic construct
LQHNNYPFT

SEQ ID NO: 982 - protein, 8 aa, synthetic construct
QQYDILLT

SEQ ID NO: 983 - protein, 8 aa, synthetic construct
QQYDILLT

SEQ ID NO: 984 - protein, 8 aa, synthetic construct
QQYDILLT

SEQ ID NO: 985 - protein, 8 aa, synthetic construct
QQYDILLT

SEQ ID NO: 986 - protein, 8 aa, synthetic construct
QQYDILLT

SEQ ID NO: 987 - protein, 8 aa, synthetic construct
QQYDILLT

SEQ ID NO: 988 - protein, 8 aa, synthetic construct
QQYDILLT

SEQ ID NO: 989 - protein, 8 aa, synthetic construct
QQYDILLT

SEQ ID NO: 990 - protein, 8 aa, synthetic construct
QQYDILLT

SEQ ID NO: 991 - protein, 9 aa, synthetic construct
LQHNNYPFT

SEQ ID NO: 992 - protein, 9 aa, synthetic construct
LQHNNYPFT

SEQ ID NO: 993 - protein, 9 aa, synthetic construct
LQHNNYPFT

SEQ ID NO: 994 - protein, 9 aa, synthetic construct
LQHNNYPFT

SEQ ID NO: 995 - protein, 9 aa, synthetic construct
LQHNNYPFT

SEQ ID NO: 996 - protein, 9 aa, synthetic construct
LQHNNYPFT

SEQ ID NO: 997 - protein, 9 aa, synthetic construct
LQHNNYPFT

SEQ ID NO: 998 - protein, 8 aa, synthetic construct
QQYDDLFT

SEQ ID NO: 999 - protein, 8 aa, synthetic construct
QQYDDLFT

SEQ ID NO: 1000 - protein, 8 aa, synthetic construct
QQYDDLFT

SEQ ID NO: 1001 - protein, 8 aa, synthetic construct
QQYDDLFT

SEQ ID NO: 1002 - protein, 8 aa, synthetic construct
QQYDDLFT

SEQ ID NO: 1003 - protein, 8 aa, synthetic construct
QQYDDLFT

SEQ ID NO: 1004 - protein, 8 aa, synthetic construct
QQYDDLFT

SEQ ID NO: 1005 - protein, 8 aa, synthetic construct
QQYDDLFT

SEQ ID NO: 1006 - protein, 8 aa, synthetic construct
QQYDDLFT

SEQ ID NO: 1007 - protein, 8 aa, synthetic construct
QQYDDLFT

SEQ ID NO: 1008 - protein, 8 aa, synthetic construct
QQYDDLFT

SEQ ID NO: 1009 - protein, 8 aa, synthetic construct
QQYGSSPR

SEQ ID NO: 1010 - protein, 8 aa, synthetic construct
QQYGSSPR

SEQ ID NO: 1011 - protein, 8 aa, synthetic construct
QQYGSSPR

SEQ ID NO: 1012 - protein, 8 aa, synthetic construct
QQYGSSPR

SEQ ID NO: 1013 - protein, 9 aa, synthetic construct
QQYNNWPLT

SEQ ID NO: 1014 - protein, 9 aa, synthetic construct
QQYNNWPLT

SEQ ID NO: 1015 - protein, 9 aa, synthetic construct
QQYNNWPLT

SEQ ID NO: 1016 - protein, 9 aa, synthetic construct
QQYNNWPLT

SEQ ID NO: 1017 - protein, 9 aa, synthetic construct
QQYNNFPLT

SEQ ID NO: 1018 - protein, 9 aa, synthetic construct
QQYNNYPLT

SEQ ID NO: 1019 - protein, 9 aa, synthetic construct
QQYNNWPLT

SEQ ID NO: 1020 - protein, 9 aa, synthetic construct
QQYNNWPLT

SEQ ID NO: 1021 - protein, 9 aa, synthetic construct
QQYGSSPLT

SEQ ID NO: 1022 - protein, 9 aa, synthetic construct
QQYGSSPLT

SEQ ID NO: 1023 - protein, 9 aa, synthetic construct
QQYGSSPLT

SEQ ID NO: 1024 - protein, 9 aa, synthetic construct
QQYGSSPLT

SEQ ID NO: 1025 - protein, 9 aa, synthetic construct
QQYGSSPLT

SEQ ID NO: 1026 - protein, 9 aa, synthetic construct
QQYGSSPLT

SEQ ID NO: 1027 - protein, 9 aa, synthetic construct
QQYGSSPLT

SEQ ID NO: 1028 - protein, 9 aa, synthetic construct
QQYYSTPWT

SEQ ID NO: 1029 - protein, 9 aa, synthetic construct
QQYYSTPWT

SEQ ID NO: 1030 - protein, 9 aa, synthetic construct
QQYYSTPWT

SEQ ID NO: 1031 - protein, 9 aa, synthetic construct
QQYYSTPWT

SEQ ID NO: 1032 - protein, 9 aa, synthetic construct
QQYYSTPWT

SEQ ID NO: 1033 - protein, 9 aa, synthetic construct
QQYYSTPWT

SEQ ID NO: 1034 - protein, 9 aa, synthetic construct
QQYYSTPWT

SEQ ID NO: 1035 - protein, 9 aa, synthetic construct
QQYYSTPWT

SEQ ID NO: 1036 - protein, 9 aa, synthetic construct
QQYYSTPWT

SEQ ID NO: 1037 - protein, 9 aa, synthetic construct
QQYYSTPWT

SEQ ID NO: 1038 - protein, 9 aa, synthetic construct
QQYYSTPWT

SEQ ID NO: 1039 - protein, 9 aa, synthetic construct
QQYYRTPWT

SEQ ID NO: 1040 - protein, 9 aa, synthetic construct
QQYYRTPWT

SEQ ID NO: 1041 - protein, 9 aa, synthetic construct
QQYYRTPWT

SEQ ID NO: 1042 - protein, 9 aa, synthetic construct
QQYYRTPWT

SEQ ID NO: 1043 - protein, 9 aa, synthetic construct
QQYYRTPWT

SEQ ID NO: 1044 - protein, 9 aa, synthetic construct
QQYYRTPWT

SEQ ID NO: 1045 - protein, 9 aa, synthetic construct
QQYYRTPWT

SEQ ID NO: 1046 - protein, 9 aa, synthetic construct
QQYYRTPWT

SEQ ID NO: 1047 - protein, 9 aa, synthetic construct
QQYYRTPWT

SEQ ID NO: 1048 - protein, 9 aa, synthetic construct
QQYYSTPWT

SEQ ID NO: 1049 - protein, 9 aa, synthetic construct
QQYYSTPWT

SEQ ID NO: 1050 - protein, 9 aa, synthetic construct
QQYYSTPWT

SEQ ID NO: 1051 - protein, 9 aa, synthetic construct
QQYYSTPWT

SEQ ID NO: 1052 - protein, 9 aa, synthetic construct
QQYYSTPWT

SEQ ID NO: 1053 - protein, 9 aa, synthetic construct
QQYYRTPWT

SEQ ID NO: 1054 - protein, 9 aa, synthetic construct
QQYYRTPWT

SEQ ID NO: 1055 - protein, 9 aa, synthetic construct
QQYYRTPWT

SEQ ID NO: 1056 - protein, 9 aa, synthetic construct
QQYYRTPWT

SEQ ID NO: 1057 - protein, 9 aa, synthetic construct
QQYYRTPWT

SEQ ID NO: 1058 - protein, 9 aa, synthetic construct
QQYYRTPWT

SEQ ID NO: 1059 - protein, 9 aa, synthetic construct
QQYYRTPWT

SEQ ID NO: 1060 - protein, 9 aa, synthetic construct
QQYYRTPWT

SEQ ID NO: 1061 - protein, 9 aa, synthetic construct
QQYYRTPWT

SEQ ID NO: 1062 - protein, 9 aa, synthetic construct
QQYYRTPWT

SEQ ID NO: 1063 - protein, 9 aa, synthetic construct
QQYYRTPWT

SEQ ID NO: 1064 - protein, 9 aa, synthetic construct
QQYYRTPWT

SEQ ID NO: 1065 - protein, 9 aa, synthetic construct
QQYYRTPWT

SEQ ID NO: 1066 - protein, 11 aa, synthetic construct
ATFDESLSGPV

SEQ ID NO: 1067 - protein, 11 aa, synthetic construct
ATFDESLQGPV

SEQ ID NO: 1068 - protein, 11 aa, synthetic construct
ATFDESLSGPV

SEQ ID NO: 1069 - protein, 11 aa, synthetic construct
ATFDESLQGPV

SEQ ID NO: 1070 - protein, 11 aa, synthetic construct
ATFDDSLNGPV

SEQ ID NO: 1071 - protein, 11 aa, synthetic construct
ATFDDSLNGPV

SEQ ID NO: 1072 - protein, 11 aa, synthetic construct
ATFDESLNGPV

SEQ ID NO: 1073 - protein, 11 aa, synthetic construct
ATFDDSLQGPV

SEQ ID NO: 1074 - protein, 11 aa, synthetic construct
ATFDDSLSGPV

SEQ ID NO: 1075 - protein, 11 aa, synthetic construct
ATFDDSLNAPV

SEQ ID NO: 1076 - protein, 11 aa, synthetic construct
ATFDSSLNGPV

SEQ ID NO: 1077 - protein, 11 aa, synthetic construct
ATFDSSLNAPV

SEQ ID NO: 1078 - protein, 11 aa, synthetic construct
ATFDSSLNAPV

SEQ ID NO: 1079 - protein, 11 aa, synthetic construct
ATFDESLSGPV

SEQ ID NO: 1080 - protein, 9 aa, synthetic construct
LQHNNYPFT

SEQ ID NO: 1081 - protein, 9 aa, synthetic construct
LQHNNYPFT

SEQ ID NO: 1082 - protein, 11 aa, synthetic construct
ATFDSSLSGPV

SEQ ID NO: 1083 - protein, 9 aa, synthetic construct
QQSYSTLIS

SEQ ID NO: 1084 - protein, 11 aa, synthetic construct
GTWDSSLSAVV

SEQ ID NO: 1085 - protein, 9 aa, synthetic construct
QQSYSTLIS

SEQ ID NO: 1086 - protein, 9 aa, synthetic construct
QQSYSTLIS

SEQ ID NO: 1087 - protein, 9 aa, synthetic construct
QQSYSTLIS

SEQ ID NO: 1088 - protein, 9 aa, synthetic construct
QQSYSTLIS

SEQ ID NO: 1089 - protein, 9 aa, synthetic construct
QQSYSTLIS

SEQ ID NO: 1090 - protein, 9 aa, synthetic construct
QQSYSTLIS

SEQ ID NO: 1091 - protein, 11 aa, synthetic construct
GTWDSSLSAVV

SEQ ID NO: 1092 - protein, 11 aa, synthetic construct
GTWDSSLSAVV

SEQ ID NO: 1093 - protein, 11 aa, synthetic construct
GTWDSSLSAVV

SEQ ID NO: 1094 - protein, 11 aa, synthetic construct
GTFESSLSAVV

SEQ ID NO: 1095 - protein, 11 aa, synthetic construct
GTWDSSLSAVV

SEQ ID NO: 1096 - protein, 11 aa, synthetic construct
GTWDSSLSAVV

SEQ ID NO: 1097 - protein, 11 aa, synthetic construct
GTWDSSLSAVV

SEQ ID NO: 1098 - protein, 11 aa, synthetic construct
GTFESSLSAVV

SEQ ID NO: 1099 - protein, 9 aa, synthetic construct
QQSYSTLLS

SEQ ID NO: 1100 - protein, 5 aa, synthetic construct
GYYMH

SEQ ID NO: 1101 - protein, 5 aa, synthetic construct
NFGMH

SEQ ID NO: 1102 - protein, 5 aa, synthetic construct
YFGMH

SEQ ID NO: 1103 - protein, 5 aa, synthetic construct
SYGMH

SEQ ID NO: 1104 - protein, 5 aa, synthetic construct
GYYIH

SEQ ID NO: 1105 - protein, 5 aa, synthetic construct
GYYIH

SEQ ID NO: 1106 - protein, 5 aa, synthetic construct
GYYIH

SEQ ID NO: 1107 - protein, 5 aa, synthetic construct
GYYIH

SEQ ID NO: 1108 - protein, 7 aa, synthetic construct
SGGYYWS

SEQ ID NO: 1109 - protein, 5 aa, synthetic construct
NYGMH

SEQ ID NO: 1110 - protein, 5 aa, synthetic construct
YFGMH

SEQ ID NO: 1111 - protein, 5 aa, synthetic construct
SYGMH

SEQ ID NO: 1112 - protein, 5 aa, synthetic construct
SYYWS

SEQ ID NO: 1113 - protein, 5 aa, synthetic construct
SYYWS

SEQ ID NO: 1114 - protein, 5 aa, synthetic construct
YFGMH

SEQ ID NO: 1115 - protein, 5 aa, synthetic construct
YFGMH

SEQ ID NO: 1116 - protein, 5 aa, synthetic construct
YFGMH

SEQ ID NO: 1117 - protein, 5 aa, synthetic construct
YFGMH

SEQ ID NO: 1118 - protein, 5 aa, synthetic construct
YFGMH

SEQ ID NO: 1119 - protein, 5 aa, synthetic construct
YFGMH

SEQ ID NO: 1120 - protein, 5 aa, synthetic construct
NFGMH

SEQ ID NO: 1121 - protein, 5 aa, synthetic construct
NFGMH

SEQ ID NO: 1122 - protein, 5 aa, synthetic construct
NFGMH

SEQ ID NO: 1123 - protein, 5 aa, synthetic construct
NFGMH

SEQ ID NO: 1124 - protein, 5 aa, synthetic construct
NFGMH

SEQ ID NO: 1125 - protein, 5 aa, synthetic construct
NFGMH

SEQ ID NO: 1126 - protein, 5 aa, synthetic construct
NFGMH

SEQ ID NO: 1127 - protein, 5 aa, synthetic construct
NFGMH

SEQ ID NO: 1128 - protein, 5 aa, synthetic construct
NFGMH

SEQ ID NO: 1129 - protein, 5 aa, synthetic construct
NFGMH

SEQ ID NO: 1130 - protein, 5 aa, synthetic construct
NFGMH

SEQ ID NO: 1131 - protein, 5 aa, synthetic construct
NFGMH

SEQ ID NO: 1132 - protein, 5 aa, synthetic construct
NFGMH

SEQ ID NO: 1133 - protein, 5 aa, synthetic construct
NFGMH

SEQ ID NO: 1134 - protein, 5 aa, synthetic construct
NFGMH

SEQ ID NO: 1135 - protein, 5 aa, synthetic construct
NFGMH

SEQ ID NO: 1136 - protein, 5 aa, synthetic construct
NFGMH

SEQ ID NO: 1137 - protein, 5 aa, synthetic construct
NFGMH

SEQ ID NO: 1138 - protein, 5 aa, synthetic construct
NFGMH

SEQ ID NO: 1139 - protein, 5 aa, synthetic construct
SYGMH

SEQ ID NO: 1140 - protein, 5 aa, synthetic construct
SYGMH

SEQ ID NO: 1141 - protein, 5 aa, synthetic construct
SYGMH

SEQ ID NO: 1142 - protein, 5 aa, synthetic construct
SYGMH

SEQ ID NO: 1143 - protein, 5 aa, synthetic construct
SYGMH

SEQ ID NO: 1144 - protein, 5 aa, synthetic construct
SYGMH

SEQ ID NO: 1145 - protein, 5 aa, synthetic construct
SYGMH

SEQ ID NO: 1146 - protein, 5 aa, synthetic construct
SYGMH

SEQ ID NO: 1147 - protein, 5 aa, synthetic construct
SYGMH

SEQ ID NO: 1148 - protein, 5 aa, synthetic construct
YFGMH

SEQ ID NO: 1149 - protein, 5 aa, synthetic construct
YFGMH

SEQ ID NO: 1150 - protein, 5 aa, synthetic construct
YFGMH

SEQ ID NO: 1151 - protein, 5 aa, synthetic construct
YFGMH

SEQ ID NO: 1152 - protein, 5 aa, synthetic construct
YFGMH

SEQ ID NO: 1153 - protein, 5 aa, synthetic construct
YFGMH

SEQ ID NO: 1154 - protein, 5 aa, synthetic construct
YFGMH

SEQ ID NO: 1155 - protein, 5 aa, synthetic construct
SYGMH

SEQ ID NO: 1156 - protein, 5 aa, synthetic construct
SYGMH

SEQ ID NO: 1157 - protein, 5 aa, synthetic construct
SYGMH

SEQ ID NO: 1158 - protein, 5 aa, synthetic construct
SYGMH

SEQ ID NO: 1159 - protein, 5 aa, synthetic construct
SYGMH

SEQ ID NO: 1160 - protein, 5 aa, synthetic construct
SYGMH

SEQ ID NO: 1161 - protein, 5 aa, synthetic construct
SYGMH

SEQ ID NO: 1162 - protein, 5 aa, synthetic construct
SYGMH

SEQ ID NO: 1163 - protein, 5 aa, synthetic construct
SYGMH

SEQ ID NO: 1164 - protein, 5 aa, synthetic construct
SYGMH

SEQ ID NO: 1165 - protein, 5 aa, synthetic construct
SYGMH

SEQ ID NO: 1166 - protein, 5 aa, synthetic construct
SYGMH

SEQ ID NO: 1167 - protein, 5 aa, synthetic construct
SYGMH

SEQ ID NO: 1168 - protein, 5 aa, synthetic construct
SYGMH

SEQ ID NO: 1169 - protein, 5 aa, synthetic construct
SYGMH

SEQ ID NO: 1170 - protein, 5 aa, synthetic construct
NYGMH

SEQ ID NO: 1171 - protein, 5 aa, synthetic construct
NYGMH

SEQ ID NO: 1172 - protein, 5 aa, synthetic construct
NYGMH

SEQ ID NO: 1173 - protein, 5 aa, synthetic construct
NYGMH

SEQ ID NO: 1174 - protein, 5 aa, synthetic construct
NYGMH

SEQ ID NO: 1175 - protein, 5 aa, synthetic construct
NYGMH

SEQ ID NO: 1176 - protein, 5 aa, synthetic construct
NYGMH

SEQ ID NO: 1177 - protein, 5 aa, synthetic construct
NYGMH

SEQ ID NO: 1178 - protein, 7 aa, synthetic construct
SGGYYWS

SEQ ID NO: 1179 - protein, 7 aa, synthetic construct
SGGYYWS

SEQ ID NO: 1180 - protein, 7 aa, synthetic construct
SGGYYWS

SEQ ID NO: 1181 - protein, 7 aa, synthetic construct
SGGYYWS

SEQ ID NO: 1182 - protein, 7 aa, synthetic construct
SGGYYWS

SEQ ID NO: 1183 - protein, 7 aa, synthetic construct
SGGYYWS

SEQ ID NO: 1184 - protein, 7 aa, synthetic construct
SGGYYWS

SEQ ID NO: 1185 - protein, 5 aa, synthetic construct
GYYIH

SEQ ID NO: 1186 - protein, 5 aa, synthetic construct
GYYIH

SEQ ID NO: 1187 - protein, 5 aa, synthetic construct
GYYIH

SEQ ID NO: 1188 - protein, 5 aa, synthetic construct
GYYIH

SEQ ID NO: 1189 - protein, 5 aa, synthetic construct
GYYIH

SEQ ID NO: 1190 - protein, 5 aa, synthetic construct
GYYIH

SEQ ID NO: 1191 - protein, 5 aa, synthetic construct
GYYIH

SEQ ID NO: 1192 - protein, 5 aa, synthetic construct
GYYIH

SEQ ID NO: 1193 - protein, 5 aa, synthetic construct
GYYIH

SEQ ID NO: 1194 - protein, 5 aa, synthetic construct
GYYIH

SEQ ID NO: 1195 - protein, 5 aa, synthetic construct
GYYIH

SEQ ID NO: 1196 - protein, 5 aa, synthetic construct
GYYIH

SEQ ID NO: 1197 - protein, 5 aa, synthetic construct
GYYIH

SEQ ID NO: 1198 - protein, 5 aa, synthetic construct
GYYIH

SEQ ID NO: 1199 - protein, 5 aa, synthetic construct
GYYIH

SEQ ID NO: 1200 - protein, 5 aa, synthetic construct
GYYIH

SEQ ID NO: 1201 - protein, 5 aa, synthetic construct
GYYIH

SEQ ID NO: 1202 - protein, 5 aa, synthetic construct
GYYIH

SEQ ID NO: 1203 - protein, 5 aa, synthetic construct
GYYIH

SEQ ID NO: 1204 - protein, 5 aa, synthetic construct
GYYIH

SEQ ID NO: 1205 - protein, 5 aa, synthetic construct
GYYIH

SEQ ID NO: 1206 - protein, 5 aa, synthetic construct
GYYIH

SEQ ID NO: 1207 - protein, 5 aa, synthetic construct
GYYIH

SEQ ID NO: 1208 - protein, 5 aa, synthetic construct
GYYIH

SEQ ID NO: 1209 - protein, 5 aa, synthetic construct
GYYIH

SEQ ID NO: 1210 - protein, 5 aa, synthetic construct
GYYIH

SEQ ID NO: 1211 - protein, 5 aa, synthetic construct
GYYIH

SEQ ID NO: 1212 - protein, 5 aa, synthetic construct
GYYIH

SEQ ID NO: 1213 - protein, 5 aa, synthetic construct
GYYIH

SEQ ID NO: 1214 - protein, 5 aa, synthetic construct
GYYIH

SEQ ID NO: 1215 - protein, 5 aa, synthetic construct
GYYIH

SEQ ID NO: 1216 - protein, 5 aa, synthetic construct
GYYIH

SEQ ID NO: 1217 - protein, 5 aa, synthetic construct
GYYIH

SEQ ID NO: 1218 - protein, 5 aa, synthetic construct
GYYIH

SEQ ID NO: 1219 - protein, 5 aa, synthetic construct
GYYIH

SEQ ID NO: 1220 - protein, 5 aa, synthetic construct
GYYIH

SEQ ID NO: 1221 - protein, 5 aa, synthetic construct
GYYIH

SEQ ID NO: 1222 - protein, 5 aa, synthetic construct
GYYIH

SEQ ID NO: 1223 - protein, 5 aa, synthetic construct
GYYMH

SEQ ID NO: 1224 - protein, 5 aa, synthetic construct
GYYMH

SEQ ID NO: 1225 - protein, 5 aa, synthetic construct
GYYMH

SEQ ID NO: 1226 - protein, 5 aa, synthetic construct
GYYMH

SEQ ID NO: 1227 - protein, 5 aa, synthetic construct
GYYMH

SEQ ID NO: 1228 - protein, 5 aa, synthetic construct
GYYMH

SEQ ID NO: 1229 - protein, 5 aa, synthetic construct
GYYMH

SEQ ID NO: 1230 - protein, 5 aa, synthetic construct
GYYMH

SEQ ID NO: 1231 - protein, 5 aa, synthetic construct
GYYMH

SEQ ID NO: 1232 - protein, 5 aa, synthetic construct
GYYMH

SEQ ID NO: 1233 - protein, 5 aa, synthetic construct
GYYMH

SEQ ID NO: 1234 - protein, 5 aa, synthetic construct
GYYMH

SEQ ID NO: 1235 - protein, 5 aa, synthetic construct
GYYMH

SEQ ID NO: 1236 - protein, 5 aa, synthetic construct
GYYMH

SEQ ID NO: 1237 - protein, 5 aa, synthetic construct
NFGMH

SEQ ID NO: 1238 - protein, 5 aa, synthetic construct
YFGMH

SEQ ID NO: 1239 - protein, 5 aa, synthetic construct
GYYMH

SEQ ID NO: 1240 - protein, 5 aa, synthetic construct
SYGIH

SEQ ID NO: 1241 - protein, 5 aa, synthetic construct
SYDIN

SEQ ID NO: 1242 - protein, 5 aa, synthetic construct
SYGIH

SEQ ID NO: 1243 - protein, 5 aa, synthetic construct
SYGIH

SEQ ID NO: 1244 - protein, 5 aa, synthetic construct
SYGIH

SEQ ID NO: 1245 - protein, 5 aa, synthetic construct
SYGIH

SEQ ID NO: 1246 - protein, 5 aa, synthetic construct
SYGIH

SEQ ID NO: 1247 - protein, 5 aa, synthetic construct
SYGIH

SEQ ID NO: 1248 - protein, 5 aa, synthetic construct
SYDIN

SEQ ID NO: 1249 - protein, 5 aa, synthetic construct
SYDIN

SEQ ID NO: 1250 - protein, 5 aa, synthetic construct
SYDIN

SEQ ID NO: 1251 - protein, 5 aa, synthetic construct
SYDIN

SEQ ID NO: 1252 - protein, 5 aa, synthetic construct
SYDIN

SEQ ID NO: 1253 - protein, 5 aa, synthetic construct
SYDIN

SEQ ID NO: 1254 - protein, 5 aa, synthetic construct
SYDIN

SEQ ID NO: 1255 - protein, 5 aa, synthetic construct
SYDIN

SEQ ID NO: 1256 - protein, 5 aa, synthetic construct
SYGIH

SEQ ID NO: 1257 - protein, 17 aa, synthetic construct
WINPNSGGTNYAQKFQG

SEQ ID NO: 1258 - protein, 17 aa, synthetic construct
VIWYDGSNENYADSVKG

SEQ ID NO: 1259 - protein, 17 aa, synthetic construct
VIWYDGSNKYYADSVKG

SEQ ID NO: 1260 - protein, 17 aa, synthetic construct
VIWYDGSNKYYADSVKG

SEQ ID NO: 1261 - protein, 17 aa, synthetic construct
WINPDSGGTDYSQRFQG

SEQ ID NO: 1262 - protein, 17 aa, synthetic construct
WINPDSGGTDYSQRFQG

SEQ ID NO: 1263 - protein, 17 aa, synthetic construct
WISPNSGDTSYAQKFQD

SEQ ID NO: 1264 - protein, 17 aa, synthetic construct
WISPNNGDTNYAQKFQD

SEQ ID NO: 1265 - protein, 16 aa, synthetic construct
YIYYSGSTYYNPSLKS

SEQ ID NO: 1266 - protein, 17 aa, synthetic construct
AIWFDGSDKYYADSVKG

SEQ ID NO: 1267 - protein, 17 aa, synthetic construct
VIWYDGSNKYYADSVKG

SEQ ID NO: 1268 - protein, 17 aa, synthetic construct
AIWYDGNNKYYADSVKG

SEQ ID NO: 1269 - protein, 16 aa, synthetic construct
RIYTSGSTNYNPSLKS

SEQ ID NO: 1270 - protein, 16 aa, synthetic construct
RIYTSGSTNYNPSLKS

SEQ ID NO: 1271 - protein, 17 aa, synthetic construct
VIWYDASNKYYADAVKG

SEQ ID NO: 1272 - protein, 17 aa, synthetic construct
VIWYDASNKYYADSVKG

SEQ ID NO: 1273 - protein, 17 aa, synthetic construct
VIWYDGSNKYYADAVKG

SEQ ID NO: 1274 - protein, 17 aa, synthetic construct
VIWYDASNKYYADAVKG

SEQ ID NO: 1275 - protein, 17 aa, synthetic construct
VIWYDASNKYYADAVKG

SEQ ID NO: 1276 - protein, 17 aa, synthetic construct
VIWYDASNKYYADAVKG

SEQ ID NO: 1277 - protein, 17 aa, synthetic construct
VIWYDASNENYADAVKG

SEQ ID NO: 1278 - protein, 17 aa, synthetic construct
VIWYDASNENYADAVKG

SEQ ID NO: 1279 - protein, 17 aa, synthetic construct
VIWYDASNENYADAVKG

SEQ ID NO: 1280 - protein, 17 aa, synthetic construct
VIWYDASNENYADSVKG

SEQ ID NO: 1281 - protein, 17 aa, synthetic construct
VIWYDGSNENYADAVKG

SEQ ID NO: 1282 - protein, 17 aa, synthetic construct
VIWYDASNENYADAVKG

SEQ ID NO: 1283 - protein, 17 aa, synthetic construct
VIWYDASNENYADAVKG

SEQ ID NO: 1284 - protein, 17 aa, synthetic construct
VIWYDGSNENYADSVKG

SEQ ID NO: 1285 - protein, 17 aa, synthetic construct
VIWYDASNENYADAVKG

SEQ ID NO: 1286 - protein, 17 aa, synthetic construct
VIWYDASNENYADAVKG

SEQ ID NO: 1287 - protein, 17 aa, synthetic construct
VIWYDASNENYADAVKG

SEQ ID NO: 1288 - protein, 17 aa, synthetic construct
VIWYDASNENYADAVKG

SEQ ID NO: 1289 - protein, 17 aa, synthetic construct
VIWYDASNENYADAVKG

SEQ ID NO: 1290 - protein, 17 aa, synthetic construct
VIWYDASNENYADAVKG

SEQ ID NO: 1291 - protein, 17 aa, synthetic construct
VIWYDASNENYADAVKG

SEQ ID NO: 1292 - protein, 17 aa, synthetic construct
VIWYDGSNENYADAVKG

SEQ ID NO: 1293 - protein, 17 aa, synthetic construct
VIWYDASNENYADSVKG

SEQ ID NO: 1294 - protein, 17 aa, synthetic construct
VIWYDASNENYADAVKG

SEQ ID NO: 1295 - protein, 17 aa, synthetic construct
VIWYDASNENYADAVKG

SEQ ID NO: 1296 - protein, 17 aa, synthetic construct
VIWYDASNKYYADAVKG

SEQ ID NO: 1297 - protein, 17 aa, synthetic construct
VIWYDASNKYYADAVKG

SEQ ID NO: 1298 - protein, 17 aa, synthetic construct
VIWYDASNKYYADAVKG

SEQ ID NO: 1299 - protein, 17 aa, synthetic construct
VIWYDASNKYYADAVKG

SEQ ID NO: 1300 - protein, 17 aa, synthetic construct
VIWYDASNKYYADAVKG

SEQ ID NO: 1301 - protein, 17 aa, synthetic construct
VIWYDASNKYYADAVKG

SEQ ID NO: 1302 - protein, 17 aa, synthetic construct
VIWYDASNKYYADAVKG

SEQ ID NO: 1303 - protein, 17 aa, synthetic construct
VIWYDASNKYYADSVKG

SEQ ID NO: 1304 - protein, 17 aa, synthetic construct
VIWYDGSNKYYADAVKG

SEQ ID NO: 1305 - protein, 17 aa, synthetic construct
VIWYDASNKYYADAVKG

SEQ ID NO: 1306 - protein, 17 aa, synthetic construct
VIWYDASNKYYADAVKG

SEQ ID NO: 1307 - protein, 17 aa, synthetic construct
VIWYDASNKYYADAVKG

SEQ ID NO: 1308 - protein, 17 aa, synthetic construct
VIWYDASNKYYADAVKG

SEQ ID NO: 1309 - protein, 17 aa, synthetic construct
VIWYDGSNKYYADSVKG

SEQ ID NO: 1310 - protein, 17 aa, synthetic construct
VIWYDASNKYYADSVKG

SEQ ID NO: 1311 - protein, 17 aa, synthetic construct
VIWYDGSNKYYADAVKG

SEQ ID NO: 1312 - protein, 17 aa, synthetic construct
AIWYDANNKYYADAVKG

SEQ ID NO: 1313 - protein, 17 aa, synthetic construct
AIWYDANNKYYADAVKG

SEQ ID NO: 1314 - protein, 17 aa, synthetic construct
AIWYDANNKYYADAVKG

SEQ ID NO: 1315 - protein, 17 aa, synthetic construct
AIWYDANNKYYADAVKG

SEQ ID NO: 1316 - protein, 17 aa, synthetic construct
AIWYDANNKYYADAVKG

SEQ ID NO: 1317 - protein, 17 aa, synthetic construct
AIWYDANNKYYADAVKG

SEQ ID NO: 1318 - protein, 17 aa, synthetic construct
AIWYDANNKYYADAVKG

SEQ ID NO: 1319 - protein, 17 aa, synthetic construct
AIWYDGNNKYYADAVKG

SEQ ID NO: 1320 - protein, 17 aa, synthetic construct
AIWYDANNKYYADSVKG

SEQ ID NO: 1321 - protein, 17 aa, synthetic construct
AIWYDANNKYYADAVKG

SEQ ID NO: 1322 - protein, 17 aa, synthetic construct
AIWYDANNKYYADAVKG

SEQ ID NO: 1323 - protein, 17 aa, synthetic construct
VIWYDASNKYYEDAVKG

SEQ ID NO: 1324 - protein, 17 aa, synthetic construct
VIWYDGSNKYYEDSVKG

SEQ ID NO: 1325 - protein, 17 aa, synthetic construct
VIWYDGSNKYYEDAVKG

SEQ ID NO: 1326 - protein, 17 aa, synthetic construct
VIWYDASNKYYEDSVKG

SEQ ID NO: 1327 - protein, 17 aa, synthetic construct
AIWFDASDKYYADAVKG

SEQ ID NO: 1328 - protein, 17 aa, synthetic construct
AIWFDASDKYYADSVKG

SEQ ID NO: 1329 - protein, 17 aa, synthetic construct
AIWFDGSDKYYADAVKG

SEQ ID NO: 1330 - protein, 17 aa, synthetic construct
AIWFDASDKYYADAVKG

SEQ ID NO: 1331 - protein, 17 aa, synthetic construct
AIWFDASDKYYADAVKG

SEQ ID NO: 1332 - protein, 17 aa, synthetic construct
AIWFDASDKYYADAVKG

SEQ ID NO: 1333 - protein, 17 aa, synthetic construct
AIWFDASDKYYADAVKG

SEQ ID NO: 1334 - protein, 17 aa, synthetic construct
AIWFDASDKYYADAVKG

SEQ ID NO: 1335 - protein, 16 aa, synthetic construct
YIYYSGSTYYNPSLKS

SEQ ID NO: 1336 - protein, 16 aa, synthetic construct
YIYYSGSTYYNPSLKS

SEQ ID NO: 1337 - protein, 16 aa, synthetic construct
YIYYSGSTYYNPSLKS

SEQ ID NO: 1338 - protein, 16 aa, synthetic construct
YIYYSGSTYYNPSLKS

SEQ ID NO: 1339 - protein, 16 aa, synthetic construct
YIYYSGSTYYNPSLKS

SEQ ID NO: 1340 - protein, 16 aa, synthetic construct
YIYYSGSTYYNPSLKS

SEQ ID NO: 1341 - protein, 16 aa, synthetic construct
YIYYSGSTYYNPSLKS

SEQ ID NO: 1342 - protein, 17 aa, synthetic construct
WINPESGGTDYSQRFQG

SEQ ID NO: 1343 - protein, 17 aa, synthetic construct
WINPESGGTDYSQRFQG

SEQ ID NO: 1344 - protein, 17 aa, synthetic construct
WINPDAGGTDYSQRFQG

SEQ ID NO: 1345 - protein, 17 aa, synthetic construct
WINPDAGGTDYSQRFQG

SEQ ID NO: 1346 - protein, 17 aa, synthetic construct
WINPDSGGTDYSQRFQG

SEQ ID NO: 1347 - protein, 17 aa, synthetic construct
WINPDSGGTDYSQRFQG

SEQ ID NO: 1348 - protein, 17 aa, synthetic construct
WINPDSGGTDYSQRFQG

SEQ ID NO: 1349 - protein, 17 aa, synthetic construct
WINPDAGGTDYSQRFQG

SEQ ID NO: 1350 - protein, 17 aa, synthetic construct
WINPDAGGTDYSQRFQG

SEQ ID NO: 1351 - protein, 17 aa, synthetic construct
WINPDAGGTDYSQRFQG

SEQ ID NO: 1352 - protein, 17 aa, synthetic construct
WINPESGGTDYSQRFQG

SEQ ID NO: 1353 - protein, 17 aa, synthetic construct
WISPNSGETSYAQKFQD

SEQ ID NO: 1354 - protein, 17 aa, synthetic construct
WISPNSGDTSYAQKFQD

SEQ ID NO: 1355 - protein, 17 aa, synthetic construct
WISPNSGETSYAQKFQD

SEQ ID NO: 1356 - protein, 17 aa, synthetic construct
WISPNSGETSYAQKFQD

SEQ ID NO: 1357 - protein, 17 aa, synthetic construct
WISPNSGDTSYAQKFQD

SEQ ID NO: 1358 - protein, 17 aa, synthetic construct
WISPNSGETSYAQKFQD

SEQ ID NO: 1359 - protein, 17 aa, synthetic construct
WISPNSGDTSYAQKFQD

SEQ ID NO: 1360 - protein, 17 aa, synthetic construct
WISPNSGETSYAQKFQD

SEQ ID NO: 1361 - protein, 17 aa, synthetic construct
WISPNSGETSYAQKFQD

SEQ ID NO: 1362 - protein, 17 aa, synthetic construct
WINPESGGTDYSQRFQG

SEQ ID NO: 1363 - protein, 17 aa, synthetic construct
WINPESGGTDYSQRFQG

SEQ ID NO: 1364 - protein, 17 aa, synthetic construct
WINPDSGGTDYSQRFQG

SEQ ID NO: 1365 - protein, 17 aa, synthetic construct
WINPESGGTDYSQRFQG

SEQ ID NO: 1366 - protein, 17 aa, synthetic construct
WINPESGGTDYSQRFQG

SEQ ID NO: 1367 - protein, 17 aa, synthetic construct
WISPNQGETNYAQKFQD

SEQ ID NO: 1368 - protein, 17 aa, synthetic construct
WISPNQGDTNYAQKFQD

SEQ ID NO: 1369 - protein, 17 aa, synthetic construct
WISPNQGETNYAQKFQD

SEQ ID NO: 1370 - protein, 17 aa, synthetic construct
WISPNNGETNYAQKFQD

SEQ ID NO: 1371 - protein, 17 aa, synthetic construct
WISPNNGDTNYAQKFQD

SEQ ID NO: 1372 - protein, 17 aa, synthetic construct
WISPNQGDTNYAQKFQD

SEQ ID NO: 1373 - protein, 17 aa, synthetic construct
WISPNNGETNYAQKFQD

SEQ ID NO: 1374 - protein, 17 aa, synthetic construct
WISPNQGETNYAQKFQD

SEQ ID NO: 1375 - protein, 17 aa, synthetic construct
WISPNNGDTNYAQKFQD

SEQ ID NO: 1376 - protein, 17 aa, synthetic construct
WISPNQGDTNYAQKFQD

SEQ ID NO: 1377 - protein, 17 aa, synthetic construct
WISPNNGETNYAQKFQD

SEQ ID NO: 1378 - protein, 17 aa, synthetic construct
WISPNQGETNYAQKFQD

SEQ ID NO: 1379 - protein, 17 aa, synthetic construct
WISPNQGETNYAQKFQD

SEQ ID NO: 1380 - protein, 17 aa, synthetic construct
WINPNSGGTNYAQKFQG

SEQ ID NO: 1381 - protein, 17 aa, synthetic construct
WINPNSGGTNYAQKFQG

SEQ ID NO: 1382 - protein, 17 aa, synthetic construct
WINPNSGGTNYAQKFQG

SEQ ID NO: 1383 - protein, 17 aa, synthetic construct
WINPNSGGTNYAQKFQG

SEQ ID NO: 1384 - protein, 17 aa, synthetic construct
WINPNSGGTNYAQKFQG

SEQ ID NO: 1385 - protein, 17 aa, synthetic construct
WINPNSGGTNYAQKFQG

SEQ ID NO: 1386 - protein, 17 aa, synthetic construct
WINPNSGGTNYAQKFQG

SEQ ID NO: 1387 - protein, 17 aa, synthetic construct
WINPNSGGTNYAQKFQG

SEQ ID NO: 1388 - protein, 17 aa, synthetic construct
WINPNSGGTNYAQKFQG

SEQ ID NO: 1389 - protein, 17 aa, synthetic construct
WINPNSGGTNYAQKFQG

SEQ ID NO: 1390 - protein, 17 aa, synthetic construct
WINPNSGGTNYAQKFQG

SEQ ID NO: 1391 - protein, 17 aa, synthetic construct
WINPNSGGTNYAQKFQG

SEQ ID NO: 1392 - protein, 17 aa, synthetic construct
WINPNSGGTNYAQKFQG

SEQ ID NO: 1393 - protein, 17 aa, synthetic construct
WINPNSGGTNYAQKFQG

SEQ ID NO: 1394 - protein, 17 aa, synthetic construct
VIWYDASNENYADAVKG

SEQ ID NO: 1395 - protein, 17 aa, synthetic construct
VIWYDASNKYYADAVKG

SEQ ID NO: 1396 - protein, 17 aa, synthetic construct
WINPNSGGTNYAQKFQG

SEQ ID NO: 1397 - protein, 17 aa, synthetic construct
VIWYDGSNKFHADSVKG

SEQ ID NO: 1398 - protein, 17 aa, synthetic construct
WMNPNSGNTGYAQKFQG

SEQ ID NO: 1399 - protein, 17 aa, synthetic construct
VIWYDASNKFHADAVKG

SEQ ID NO: 1400 - protein, 17 aa, synthetic construct
VIWYDASNKFHADAVKG

SEQ ID NO: 1401 - protein, 17 aa, synthetic construct
VIWYDASNKFHADAVKG

SEQ ID NO: 1402 - protein, 17 aa, synthetic construct
VIWYDASNKFHADAVKG

SEQ ID NO: 1403 - protein, 17 aa, synthetic construct
VIWYDASNKFHADSVKG

SEQ ID NO: 1404 - protein, 17 aa, synthetic construct
VIWYDGSNKFHADAVKG

SEQ ID NO: 1405 - protein, 17 aa, synthetic construct
WMNPNSGGTGYAQKFQG

SEQ ID NO: 1406 - protein, 17 aa, synthetic construct
WMNPNSGNTGYAQKFQG

SEQ ID NO: 1407 - protein, 17 aa, synthetic construct
WMNPNSGGTGYAQKFQG

SEQ ID NO: 1408 - protein, 17 aa, synthetic construct
WMNPNSGGTGYAQKFQG

SEQ ID NO: 1409 - protein, 17 aa, synthetic construct
WMNPNSGGTGYAQKFQG

SEQ ID NO: 1410 - protein, 17 aa, synthetic construct
WMNPNSGNTGYAQKFQG

SEQ ID NO: 1411 - protein, 17 aa, synthetic construct
WMNPNSGGTGYAQKFQG

SEQ ID NO: 1412 - protein, 17 aa, synthetic construct
WMNPNSGGTGYAQKFQG

SEQ ID NO: 1413 - protein, 17 aa, synthetic construct
VIWYDASNKFHADAVKG

SEQ ID NO: 1414 - protein, 19 aa, synthetic construct
GGDYVWGTYRPHYYYGMDV

SEQ ID NO: 1415 - protein, 12 aa, synthetic construct
DGTIFGVVLGDY

SEQ ID NO: 1416 - protein, 12 aa, synthetic construct
DGTIFGVLLGDY

SEQ ID NO: 1417 - protein, 11 aa, synthetic construct
DRTIFGVVLDY

SEQ ID NO: 1418 - protein, 14 aa, synthetic construct
EATIFGMVIVPFDY

SEQ ID NO: 1419 - protein, 14 aa, synthetic construct
EATIFGMVIVPFDY

SEQ ID NO: 1420 - protein, 14 aa, synthetic construct
EATIFGMLIVPFDY

SEQ ID NO: 1421 - protein, 14 aa, synthetic construct
EATIFGMLIVPFDY

SEQ ID NO: 1422 - protein, 16 aa, synthetic construct
DRITIFGVVMGGGMDV

SEQ ID NO: 1423 - protein, 11 aa, synthetic construct
DQAIFGVVPDY

SEQ ID NO: 1424 - protein, 12 aa, synthetic construct
DGTIFGVLLGDY

SEQ ID NO: 1425 - protein, 11 aa, synthetic construct
DRTIFGVVLEY

SEQ ID NO: 1426 - protein, 9 aa, synthetic construct
DVAVAGFDY

SEQ ID NO: 1427 - protein, 9 aa, synthetic construct
DVAVAGFDY

SEQ ID NO: 1428 - protein, 12 aa, synthetic construct
DGTIFGVLLGDY

SEQ ID NO: 1429 - protein, 12 aa, synthetic construct
DGTIFGVLLGDY

SEQ ID NO: 1430 - protein, 12 aa, synthetic construct
DGTIFGVLLGDY

SEQ ID NO: 1431 - protein, 12 aa, synthetic construct
DGTIFGVLLGDY

SEQ ID NO: 1432 - protein, 12 aa, synthetic construct
DGTIFGVLLGDY

SEQ ID NO: 1433 - protein, 12 aa, synthetic construct
DRTIFGVLLGDY

SEQ ID NO: 1434 - protein, 12 aa, synthetic construct
DGTIFGVVLGDY

SEQ ID NO: 1435 - protein, 12 aa, synthetic construct
DGTIFGVVLGDY

SEQ ID NO: 1436 - protein, 12 aa, synthetic construct
DGTIFGVVLGDY

SEQ ID NO: 1437 - protein, 12 aa, synthetic construct
DGTIFGVVLGDY

SEQ ID NO: 1438 - protein, 12 aa, synthetic construct
DGTIFGVVLGDY

SEQ ID NO: 1439 - protein, 12 aa, synthetic construct
DRTIFGVVLGDY

SEQ ID NO: 1440 - protein, 12 aa, synthetic construct
DGTIFGVVLGDY

SEQ ID NO: 1441 - protein, 12 aa, synthetic construct
DGTIFGVVLGDY

SEQ ID NO: 1442 - protein, 12 aa, synthetic construct
DGTIFGVVLGDY

SEQ ID NO: 1443 - protein, 12 aa, synthetic construct
DGTIFGVVLGDY

SEQ ID NO: 1444 - protein, 12 aa, synthetic construct
DGTIFGVVLGDY

SEQ ID NO: 1445 - protein, 12 aa, synthetic construct
DGTIFGVVLGDY

SEQ ID NO: 1446 - protein, 12 aa, synthetic construct
DGTIFGVVLGDY

SEQ ID NO: 1447 - protein, 12 aa, synthetic construct
DGTIFGVVLGDY

SEQ ID NO: 1448 - protein, 12 aa, synthetic construct
DGTIFGVVLGDY

SEQ ID NO: 1449 - protein, 12 aa, synthetic construct
DGTIFGVVLGDY

SEQ ID NO: 1450 - protein, 12 aa, synthetic construct
DGTIFGVVLGDY

SEQ ID NO: 1451 - protein, 12 aa, synthetic construct
DRTIFGVVLGDY

SEQ ID NO: 1452 - protein, 12 aa, synthetic construct
DGTIFGVVLGDY

SEQ ID NO: 1453 - protein, 11 aa, synthetic construct
DRTIFGVVLDY

SEQ ID NO: 1454 - protein, 11 aa, synthetic construct
DRTIFGVVLDY

SEQ ID NO: 1455 - protein, 11 aa, synthetic construct
DRTIFGVVLDY

SEQ ID NO: 1456 - protein, 11 aa, synthetic construct
DRTIFGVVLDY

SEQ ID NO: 1457 - protein, 11 aa, synthetic construct
DRTIFGVVLDY

SEQ ID NO: 1458 - protein, 11 aa, synthetic construct
DRTIFGVVLDY

SEQ ID NO: 1459 - protein, 11 aa, synthetic construct
DRTIFGVVLDY

SEQ ID NO: 1460 - protein, 11 aa, synthetic construct
DRTIFGVVLDY

SEQ ID NO: 1461 - protein, 11 aa, synthetic construct
DRTIFGVVLDY

SEQ ID NO: 1462 - protein, 12 aa, synthetic construct
DGTIFGVLLGDY

SEQ ID NO: 1463 - protein, 12 aa, synthetic construct
DRTIFGVLLGDY

SEQ ID NO: 1464 - protein, 12 aa, synthetic construct
DGTIFGVLLGDY

SEQ ID NO: 1465 - protein, 12 aa, synthetic construct
DRTIFGVLLGDY

SEQ ID NO: 1466 - protein, 12 aa, synthetic construct
DGTIFGVLLGDY

SEQ ID NO: 1467 - protein, 12 aa, synthetic construct
DGTIFGVLLGDY

SEQ ID NO: 1468 - protein, 12 aa, synthetic construct
DGTIFGVLLGDY

SEQ ID NO: 1469 - protein, 11 aa, synthetic construct
DRTIFGVVLEY

SEQ ID NO: 1470 - protein, 11 aa, synthetic construct
DRTIFGVVLEY

SEQ ID NO: 1471 - protein, 11 aa, synthetic construct
DRTIFGVVLEY

SEQ ID NO: 1472 - protein, 11 aa, synthetic construct
DRTIFGVVLEY

SEQ ID NO: 1473 - protein, 11 aa, synthetic construct
DRTIFGVVLEY

SEQ ID NO: 1474 - protein, 11 aa, synthetic construct
DRTIFGVVLEY

SEQ ID NO: 1475 - protein, 11 aa, synthetic construct
DRTIFGVVLEY

SEQ ID NO: 1476 - protein, 11 aa, synthetic construct
DRTIFGVVLEY

SEQ ID NO: 1477 - protein, 11 aa, synthetic construct
DRTIFGVVLEY

SEQ ID NO: 1478 - protein, 11 aa, synthetic construct
DRTIFGVVLEY

SEQ ID NO: 1479 - protein, 11 aa, synthetic construct
DRTIFGVVLEY

SEQ ID NO: 1480 - protein, 11 aa, synthetic construct
GITIFGHGFEY

SEQ ID NO: 1481 - protein, 11 aa, synthetic construct
GITIFGHGFEY

SEQ ID NO: 1482 - protein, 11 aa, synthetic construct
GITIFGHGFEY

SEQ ID NO: 1483 - protein, 11 aa, synthetic construct
GITIFGHGFEY

SEQ ID NO: 1484 - protein, 11 aa, synthetic construct
DQAIFGVVPDY

SEQ ID NO: 1485 - protein, 11 aa, synthetic construct
DQAIFGVVPDY

SEQ ID NO: 1486 - protein, 11 aa, synthetic construct
DQAIFGVVPDY

SEQ ID NO: 1487 - protein, 11 aa, synthetic construct
DQAIFGVVPDY

SEQ ID NO: 1488 - protein, 11 aa, synthetic construct
DQAIFGVVPDY

SEQ ID NO: 1489 - protein, 11 aa, synthetic construct
DQAIFGVVPDY

SEQ ID NO: 1490 - protein, 11 aa, synthetic construct
DQAIFGVVPDY

SEQ ID NO: 1491 - protein, 11 aa, synthetic construct
DQAIFGVVPDY

SEQ ID NO: 1492 - protein, 16 aa, synthetic construct
DRITIFGVVMGGGMDV

SEQ ID NO: 1493 - protein, 16 aa, synthetic construct
DRITIFGVVMGGGMDV

SEQ ID NO: 1494 - protein, 16 aa, synthetic construct
DRITIFGVVMGGGMDV

SEQ ID NO: 1495 - protein, 16 aa, synthetic construct
DRITIFGVVMGGGMDV

SEQ ID NO: 1496 - protein, 16 aa, synthetic construct
DRITIFGVVMGGGMDV

SEQ ID NO: 1497 - protein, 16 aa, synthetic construct
DRITIFGVVMGGGMDV

SEQ ID NO: 1498 - protein, 16 aa, synthetic construct
DRITIFGVVMGGGMDV

SEQ ID NO: 1499 - protein, 14 aa, synthetic construct
EATIFGMVIVPFDY

SEQ ID NO: 1500 - protein, 14 aa, synthetic construct
EATIFGMVIVPFDY

SEQ ID NO: 1501 - protein, 14 aa, synthetic construct
EATIFGMVIVPFDY

SEQ ID NO: 1502 - protein, 14 aa, synthetic construct
EATIFGMVIVPFDY

SEQ ID NO: 1503 - protein, 14 aa, synthetic construct
EATIFGMVIVPFDY

SEQ ID NO: 1504 - protein, 14 aa, synthetic construct
EATIFGMVIVPFDY

SEQ ID NO: 1505 - protein, 14 aa, synthetic construct
EATIFGMVIVPFDY

SEQ ID NO: 1506 - protein, 14 aa, synthetic construct
EATIFGMVIVPFDY

SEQ ID NO: 1507 - protein, 14 aa, synthetic construct
EATIFGMVIVPFDY

SEQ ID NO: 1508 - protein, 14 aa, synthetic construct
EATIFGMVIVPFDY

SEQ ID NO: 1509 - protein, 14 aa, synthetic construct
EATIFGMVIVPFDY

SEQ ID NO: 1510 - protein, 14 aa, synthetic construct
EATIFGMLIVPFDY

SEQ ID NO: 1511 - protein, 14 aa, synthetic construct
EATIFGMLIVPFDY

SEQ ID NO: 1512 - protein, 14 aa, synthetic construct
EATIFGMLIVPFDY

SEQ ID NO: 1513 - protein, 14 aa, synthetic construct
EATIFGMLIVPFDY

SEQ ID NO: 1514 - protein, 14 aa, synthetic construct
EATIFGMLIVPFDY

SEQ ID NO: 1515 - protein, 14 aa, synthetic construct
EATIFGMLIVPFDY

SEQ ID NO: 1516 - protein, 14 aa, synthetic construct
EATIFGMLIVPFDY

SEQ ID NO: 1517 - protein, 14 aa, synthetic construct
EATIFGMLIVPFDY

SEQ ID NO: 1518 - protein, 14 aa, synthetic construct
EATIFGMLIVPFDY

SEQ ID NO: 1519 - protein, 14 aa, synthetic construct
EATIFGMVIVPFDY

SEQ ID NO: 1520 - protein, 14 aa, synthetic construct
EATIFGMVIVPFDY

SEQ ID NO: 1521 - protein, 14 aa, synthetic construct
EATIFGMVIVPFDY

SEQ ID NO: 1522 - protein, 14 aa, synthetic construct
EATIFGMVIVPFDY

SEQ ID NO: 1523 - protein, 14 aa, synthetic construct
EATIFGMVIVPFDY

SEQ ID NO: 1524 - protein, 14 aa, synthetic construct
EATIFGMLIVPFDY

SEQ ID NO: 1525 - protein, 14 aa, synthetic construct
EATIFGMLIVPFDY

SEQ ID NO: 1526 - protein, 14 aa, synthetic construct
EATIFGMLIVPFDY

SEQ ID NO: 1527 - protein, 14 aa, synthetic construct
EATIFGMLIVPFDY

SEQ ID NO: 1528 - protein, 14 aa, synthetic construct
EATIFGMLIVPFDY

SEQ ID NO: 1529 - protein, 14 aa, synthetic construct
EATIFGMLIVPFDY

SEQ ID NO: 1530 - protein, 14 aa, synthetic construct
EATIFGMLIVPFDY

SEQ ID NO: 1531 - protein, 14 aa, synthetic construct
EATIFGMLIVPFDY

SEQ ID NO: 1532 - protein, 14 aa, synthetic construct
EATIFGMLIVPFDY

SEQ ID NO: 1533 - protein, 14 aa, synthetic construct
EATIFGMLIVPFDY

SEQ ID NO: 1534 - protein, 14 aa, synthetic construct
EATIFGMLIVPFDY

SEQ ID NO: 1535 - protein, 14 aa, synthetic construct
EATIFGMLIVPFDY

SEQ ID NO: 1536 - protein, 14 aa, synthetic construct
EATIFGMLIVPFDY

SEQ ID NO: 1537 - protein, 19 aa, synthetic construct
GGDYVWGTYRPHYYYGMDV

SEQ ID NO: 1538 - protein, 19 aa, synthetic construct
GGDYVWGTYRPHYYYGMDV

SEQ ID NO: 1539 - protein, 19 aa, synthetic construct
GGDYVWGTYRPHYYYGMDV

SEQ ID NO: 1540 - protein, 19 aa, synthetic construct
GGDYVWGTYRPHYYYGMDV

SEQ ID NO: 1541 - protein, 19 aa, synthetic construct
GGDYVWGTYRPHYYYGMDV

SEQ ID NO: 1542 - protein, 19 aa, synthetic construct
GGDYVWGTYRPHYYYGMDV

SEQ ID NO: 1543 - protein, 19 aa, synthetic construct
GGDYVWGTYRPHYYYGMDV

SEQ ID NO: 1544 - protein, 19 aa, synthetic construct
GGDYVWGTYRPHYYYGMDV

SEQ ID NO: 1545 - protein, 19 aa, synthetic construct
GGDYVWGTYRPHYYYGMDV

SEQ ID NO: 1546 - protein, 19 aa, synthetic construct
GGDYVWGTYRPHYYYGMDV

SEQ ID NO: 1547 - protein, 19 aa, synthetic construct
GGDYVWGTYRPHYYYGMDV

SEQ ID NO: 1548 - protein, 19 aa, synthetic construct
GGDYVWGTYRPHYYYGMDV

SEQ ID NO: 1549 - protein, 19 aa, synthetic construct
GGDYVFGTYRPHYYYGMDV

SEQ ID NO: 1550 - protein, 19 aa, synthetic construct
GGDYVFGTYRPHYYYGMDV

SEQ ID NO: 1551 - protein, 12 aa, synthetic construct
DRTIFGVVLGDY

SEQ ID NO: 1552 - protein, 12 aa, synthetic construct
DRTIFGVLLGDY

SEQ ID NO: 1553 - protein, 19 aa, synthetic construct
GGDYVWGTYRPHYYYGMDV

SEQ ID NO: 1554 - protein, 12 aa, synthetic construct
GKVAGMPEAFEI

SEQ ID NO: 1555 - protein, 20 aa, synthetic construct
GGDYVWGSYRPYYYYYGMDV

SEQ ID NO: 1556 - protein, 12 aa, synthetic construct
GKVAGMPEAFEI

SEQ ID NO: 1557 - protein, 12 aa, synthetic construct
GKVAGMPEAFEI

SEQ ID NO: 1558 - protein, 12 aa, synthetic construct
GKVAGMPEAFEI

SEQ ID NO: 1559 - protein, 12 aa, synthetic construct
GKVAGMPEAFEI

SEQ ID NO: 1560 - protein, 12 aa, synthetic construct
GKVAGMPEAFEI

SEQ ID NO: 1561 - protein, 12 aa, synthetic construct
GKVAGMPEAFEI

SEQ ID NO: 1562 - protein, 20 aa, synthetic construct
GGDYVWGSYRPYYYYYGMDV

SEQ ID NO: 1563 - protein, 20 aa, synthetic construct
GGDYVWGSYRPYYYYYGMDV

SEQ ID NO: 1564 - protein, 20 aa, synthetic construct
GGDYVWGSYRPYYYYYGMDV

SEQ ID NO: 1565 - protein, 20 aa, synthetic construct
GGDYVWGSYRPYYYYYGMDV

SEQ ID NO: 1566 - protein, 20 aa, synthetic construct
GGDYVWGSYRPYYYYYGMDV

SEQ ID NO: 1567 - protein, 20 aa, synthetic construct
GGDYVWGSYRPYYYYYGMDV

SEQ ID NO: 1568 - protein, 20 aa, synthetic construct
GGDYVFGSYRPYYYYYGMDV

SEQ ID NO: 1569 - protein, 20 aa, synthetic construct
GGDYVFGSYRPYYYYYGMDV

SEQ ID NO: 1570 - protein, 12 aa, synthetic construct
GKVAGMPEAFEI

SEQ ID NO: 1571 - DNA, 333 bp, synthetic construct
  source 1..333: mol_type = other DNA
cagtctgtgctgactcagccaccctcagcgtctgggacccccgggcagagggtcaccatctcttgttctggaagtagctccaacatcggaagtaatactgtaaactggtaccagcacctcccaggaacggcccccaaactcctcatctatactaataatcagcggccctcaggggtccctgaccgattctctggctccaagtctggcacctcagcctcccttgccatcagtgggctccagtctgaggatgaggctgattatttctgtgcaacattcgatgacagcctgaatggtccggtattcggcggagggaccaagctgaccgtcctaggt

SEQ ID NO: 1572 - DNA, 324 bp, synthetic construct
  source 1..324: mol_type = other DNA
gacatccagatgacccagtctccatcctccctgtctgcatctataggagacagagtcaccatcacttgccgggcaagtcaggacattagagattatttaggctggtatcagcagaaaccagggaaagcccctaagcgcctgatctatggtgcatccagtttgcaaagtggggtcccttcaaggttcagcggcagtggatctgggacagaattcactctcacaatcagcagcctgcagcctgaagatttcgcaacttattactgtctacagcataataattaccccttcactttcggccctgggaccaaagtggatatcaaacga

SEQ ID NO: 1573 - DNA, 324 bp, synthetic construct; identical to SEQ ID NO: 1572
  source 1..324: mol_type = other DNA

SEQ ID NO: 1574 - DNA, 321 bp, synthetic construct
  source 1..321: mol_type = other DNA
gacatccagatgacccagtctccatcctccctgtctgcatctgtaggagacagagtcaccatcacttgccaggcgagtcaggacattagcaactatttaaattggtatcagcagaaaccagggaaagcccctaagctcctgatctacgatgcatccaatttggaaacaggggtcccatcaaggttcagtggaagtggatctgggacagattttagtttcaccatcagcagcctgcagcctgaagatattgcaacatattactgtcaacagtatgatattctcctcactttcggcggagggaccaaggtggagatcaagcga

SEQ ID NO: 1575 - DNA, 342 bp, synthetic construct
  source 1..342: mol_type = other DNA
gacatcgtgatgacccagtctccagactccctggctgtgtctctgggcgagagggccaccatcaactgcaagtccagccagagtgttttatccagctccaacaataagaactacatagcttggtaccagcagcaaccaggacatcctcctaagctgctcatttactgggcatctacccgggaatccggggtccctgaccgattcagtggcagcgggtctgggacagatttcactctcaccatcagcagcctgcaggctgaagatgtggcagttttttactgtcaacaatattatagtactccgtggacgttcggccaagggaccaaggtggaaatcaaacga

SEQ ID NO: 1576 - DNA, 342 bp, synthetic construct
  source 1..342: mol_type = other DNA
gacatcgtgatgacccagtctccagactccctggctgtgtctctgggcgagagggccaccatcaactgcaagtccagccagagtgttttatccagctccaacaataagaactacatagcttggtaccagcagaaaccaggacatcctcctaagctgctcatttactgggcatctacccgggaatccggggtccctgaccgattcagtggcagcgggtctgggacagatttcactctcaccatcagcagcctgcaggctgaagatgtggcagttttttactgtcaacaatattatagtactccgtggacgttcggccaagggaccaaggtggaaatcaaacga

SEQ ID NO: 1577 - DNA, 342 bp, synthetic construct
  source 1..342: mol_type = other DNA
gacatcgtgatgacccagtctccagactccctgtctgtgtctctgggcgagagggccaccatcaactgcaagtccagccagagtgttttatccagctccaacaataagaactacttagcttggtaccaacagaaaccaggacagcctcctaacctgctcatttactggacttctacccgagattccggggtccctgaccgattcagtggcagcgggtctgggacagatttcactctcaccatcaacagcctgcaggctgaagatgtggctgtttattactgtcagcaatattatcgtactccgtggacgttcggccaagggaccaaggtggaaatcaaacga

SEQ ID NO: 1578 - DNA, 342 bp, synthetic construct
  source 1..342: mol_type = other DNA
gacatcgtgatgacccagtctccagactccctgtctgtgtctctgggcgagagggccaccatcaactgcaagtccagccagagtgttttatccagctccaacaataagaactacttagcttggtaccagcagaaaccaggacagcctcctaacctgctcatttactggacttctacccgagattccggggtccctgaccgattcagtggcagcgggtctgggacagatttcactctcaccatcaacagcctgcaggctgaagatgtggctgtttattactgtcagcaatattatcgtactccgtggacgttcggccaagggaccaaggtggaaatcaaacga

SEQ ID NO: 1579 - DNA, 327 bp, synthetic construct
  source 1..327: mol_type = other DNA
gaaattgtgttgacgcagtctccaggcaccctgtctttgtctccaggggaaagagccaccctctcctgcagggccagtcagagtattagttacagttacttagcctggtaccagcagaaacctggccaggctccccggctcctcatctatggtgcatccagcagggccactggcatcccagacaggttcagtggcagtgggtctgggacagacttcactctcaccatcagcagacaggagcctgatgattttgcagtgtattactgtcagcagtatggtagttcaccgctcactttcggcggagggaccaaggtggagatcaaacga

SEQ ID NO: 1580 - DNA, 324 bp, synthetic construct
  source 1..324: mol_type = other DNA
gaaatagtgatgacgcagtctccagccaccctgtctgtgtctccaggggaaagagccaccctctcctgcagggccagtcagagtgttagcagcaacttagcctggtaccagcagaaacctggccaggctcccaggctcctcatctatggtgcagccaccagggccactggtatcccagccagggtcagtggcagtgggtctgggacagagttcactctcaccatcagcagcctgcagtctgaagattttgcagtttattactgtcagcagtataataactggcctctcactttcggcggagggaccaaggtggagatcaaacga

SEQ ID NO: 1581 - DNA, 324 bp, synthetic construct
  source 1..324: mol_type = other DNA
gacattcagatgacccagtctccatcctccctgtctgcatctgtaggagacagagtcaccatcacttgccgggcaagtcagggcattagaaatgagttaggctggtatcagcagaaaccagggaaagcccctaaacgcctgatctatggtgcatccagtttgcaaagtggggtcccatcaaggttcagcggcagtggatctgggacagagttcactctcacaatcagcagcctgcagcctgaagattttgtaacttattactgtctacagcataatagttacccattcactttcggccctgggaccaaagtggatgtcaaacga

SEQ ID NO: 1582 - DNA, 321 bp, synthetic construct
  source 1..321: mol_type = other DNA
gacatccagatgacccagtctccatcctccctgtctgcatctgtgggggacagagtcaccatcacttgccaggcgagtcaggacattaccaactatttaaattggtatcagcagaaaccagggaaagcccctaaactcctgatctacgatgcttccaatttggagccaggggtcccatcaaggttcagtggaagtggatctgggacagattttactttcaccatcagcagcctgcagcctgaagatattgcaacatattactgtcaacagtatgatgatctattcactttcggccctgggaccaaagtggatatcaaacga

SEQ ID NO: 1583 - DNA, 324 bp, synthetic construct
  source 1..324: mol_type = other DNA
gacatccagatgacccagtctccatcttccgtgtctgcatctgtaggagacagagtcaccatcacttgtcgggcgagtcagggtcttatcatctggttagcctggtatcagcagaaaccggggaaagcccctaaactcctgatctatgctgcatccagtttgcaaagtggggtcccatcaaggttcagcggcagtggctctgggacagatttcactctcaccatcagcagcctacagcctgaagattttgcaacttactattgtcaacagactaacagtttccctccgacgttcggccaagggaccaaggtggaaatcaaacga

SEQ ID NO: 1584 - DNA, 324 bp, synthetic construct; identical to SEQ ID NO: 1583
  source 1..324: mol_type = other DNA

SEQ ID NO: 1585 - DNA, 324 bp, synthetic construct
  source 1..324: mol_type = other DNA
gacattcagatgacccagtctccatcctccctgtctgcatctgtaggagacagagtcaccatcacttgccgggcaagtcagggcattagaaatgagttaggctggtatcagcagaaaccagggaaagcccctaaactcctgatctatggtgcatccagtttgcaaagtggggtcccatcaaggttcagcggcagtggatctgggacagagttcactctcacaatcagcagcctgcagcctgaagattttgtaacttattactgtctacagcataatagttacccattcactttcggccaagggaccaaagtggatgtcaaacga

SEQ ID NO: 1586 - DNA, 324 bp, synthetic construct; identical to SEQ ID NO: 1585
  source 1..324: mol_type = other DNA

SEQ ID NO: 1587 - DNA, 324 bp, synthetic construct; identical to SEQ ID NO: 1585
  source 1..324: mol_type = other DNA

SEQ ID NO: 1588 - DNA, 324 bp, synthetic construct
  source 1..324: mol_type = other DNA
gacattcagatgacccagtctccatcctccctgtctgcatctgtaggagacagagtcaccatcacttgccgggcaagtcagggcattagaaatgagttaggctggtatcagcagaaaccagggaaagcccctaaactcctgatctatggtgcatccagtttgcaaagtggggtcccatcaaggttcagcggcagtggatctgggacagagttcactctcacaatcagcagcctgcagcctgaagattttgtaacttattactgtctacagcataatagttacccattcactttcggccctgggaccaaagtggatgtcaaacga

SEQ ID NO: 1589 - DNA, 324 bp, synthetic construct
  source 1..324: mol_type = other DNA
gacattcagatgacccagtctccatcctccctgtctgcatctgtaggagacagagtcaccatcacttgccgggcaagtcagggcattagaaatgagttaggctggtatcagcagaaaccagggaaagcccctaaacgcctgatctatggtgcatccagtttgcaaagtggggtcccatcaaggttcagcggcagtggatctgggacagagttcactctcacaatcagcagcctgcagcctgaagattttgtaacttattactgtctacagcataatagttacccattcactttcggccaagggaccaaagtggatgtcaaacga

SEQ ID NO: 1590 - DNA, 324 bp, synthetic construct; identical to SEQ ID NO: 1585
  source 1..324: mol_type = other DNA

SEQ ID NO: 1591 - DNA, 324 bp, synthetic construct
  source 1..324: mol_type = other DNA
gacatccagatgacccagtctccatcctccctgtctgcatctataggagacagagtcaccatcacttgccgggcaagtcaggacattagagattatttaggctggtatcagcagaaaccagggaaagcccctaagctcctgatctatggtgcatccagtttgcaaagtggggtcccttcaaggttcagcggcagtggatctgggacagaattcactctcacaatcagcagcctgcagcctgaagatttcgcaacttattactgtctacagcataataattaccccttcactttcggccaagggaccaaagtggatatcaaacga

SEQ ID NO: 1592 - DNA, 324 bp, synthetic construct
  source 1..324: mol_type = other DNA
gacatccagatgacccagtctccatcctccctgtctgcatctataggagacagagtcaccatcacttgccgggcaagtcaggacattagagattatttaggctggtatcagcagaaaccagggaaagcccctaagcgcctgatctatggtgcatccagtttgcaaagtggggtcccttcaaggttcagcggcagtggatctgggacagaattcactctcacaatcagcagcctgcagcctgaagatttcgcaacttattactgtctacagcataataattaccccttcactttcggccaagggaccaaagtggatatcaaacga

SEQ ID NO: 1593 - DNA, 324 bp, synthetic construct
  source 1..324: mol_type = other DNA
gacatccagatgacccagtctccatcctccctgtctgcatctataggagacagagtcaccatcacttgccgggcaagtcaggacattagagattatttaggctggtatcagcagaaaccagggaaagcccctaagctcctgatctatggtgcatccagtttgcaaagtggggtcccttcaaggttcagcggcagtggatctgggacagaattcactctcacaatcagcagcctgcagcctgaagatttcgcaacttattactgtctacagcataataattaccccttcactttcggccctgggaccaaagtggatatcaaacga

SEQ ID NO: 1594 - DNA, 324 bp, synthetic construct; identical to SEQ ID NO: 1591
  source 1..324: mol_type = other DNA

SEQ ID NO: 1595 - DNA, 324 bp, synthetic construct; identical to SEQ ID NO: 1591
  source 1..324: mol_type = other DNA

SEQ ID NO: 1596 - DNA, 324 bp, synthetic construct; identical to SEQ ID NO: 1591
  source 1..324: mol_type = other DNA

SEQ ID NO: 1597 - DNA, 324 bp, synthetic construct; identical to SEQ ID NO: 1591
  source 1..324: mol_type = other DNA

SEQ ID NO: 1598 - DNA, 324 bp, synthetic construct
  source 1..324: mol_type = other DNA
gacatccagatgacccagtctccatcctccctgtctgcatctataggagacagagtcaccatcacttgccgggcaagtcaggaccttagaaattatttaggctggtatcaccagaaaccagggaaagcccctaagcgcctgatctatggtgcatccagtttgcaaagtggggtcccttcaaggttcagcggcagtggatctgggacagaattcactctcacaatcagcagcctgcagcctgaagatttcgcaacttattactgtctacagcataataattaccccttcactttcggccctgggaccaaagtggatatcaaacga

SEQ ID NO: 1599 - DNA, 324 bp, synthetic construct
  source 1..324: mol_type = other DNA
gacatccagatgacccagtctccatcctccctgtctgcatctataggagacagagtcaccatcacttgccgggcaagtcaggaccttagaaattatttaggctggtatcaacagaaaccagggaaagcccctaagctcctgatctatggtgcatccagtttgcaaagtggggtcccttcaaggttcagcggcagtggatctgggacagaattcactctcacaatcagcagcctgcagcctgaagatttcgcaacttattactgtctacagcataataattaccccttcactttcggccctgggaccaaagtggatatcaaacga

SEQ ID NO: 1600 - DNA, 324 bp, synthetic construct; identical to SEQ ID NO: 1599
  source 1..324: mol_type = other DNA

SEQ ID NO: 1601 - DNA, 324 bp, synthetic construct
  source 1..324: mol_type = other DNA
gacatccagatgacccagtctccatcctccctgtctgcatctataggagacagagtcaccatcacttgccgggcaagtcaggaccttagaaattatttaggctggtatcaccagaaaccagggaaagcccctaagctcctgatctatggtgcatccagtttgcaaagtggggtcccttcaaggttcagcggcagtggatctgggacagaattcactctcacaatcagcagcctgcagcctgaagatttcgcaacttattactgtctacagcataataattaccccttcactttcggccctgggaccaaagtggatatcaaacga

SEQ ID NO: 1602 - DNA, 324 bp, synthetic construct
  source 1..324: mol_type = other DNA
gacatccagatgacccagtctccatcctccctgtctgcatctataggagacagagtcaccatcacttgccgggcaagtcaggaccttagaaattatttaggctggtatcaacagaaaccagggaaagcccctaagcgcctgatctatggtgcatccagtttgcaaagtggggtcccttcaaggttcagcggcagtggatctgggacagaattcactctcacaatcagcagcctgcagcctgaagatttcgcaacttattactgtctacagcataataattaccccttcactttcggccctgggaccaaagtggatatcaaacga

SEQ ID NO: 1603 - DNA, 324 bp, synthetic construct; identical to SEQ ID NO: 1602
  source 1..324: mol_type = other DNA

SEQ ID NO: 1604 - DNA, 324 bp, synthetic construct; identical to SEQ ID NO: 1601
  source 1..324: mol_type = other DNA

SEQ ID NO: 1605 - DNA, 324 bp, synthetic construct; identical to SEQ ID NO: 1598
  source 1..324: mol_type = other DNA

SEQ ID NO: 1606 - DNA, 324 bp, synthetic construct; identical to SEQ ID NO: 1599
  source 1..324: mol_type = other DNA

SEQ ID NO: 1607 - DNA, 324 bp, synthetic construct; identical to SEQ ID NO: 1599
  source 1..324: mol_type = other DNA

SEQ ID NO: 1608 - DNA, 324 bp, synthetic construct
  source 1..324: mol_type = other DNA
gacatccagatgacccagtctccatcctccctgtctgcatctataggagacagagtcaccatcacttgccgggcaagtcaggaccttagaaattatttaggctggtatcaacagaaaccagggaaagcccctaagctcctgatctatggtgcatccagtttgcaaagtggggtcccttcaaggttcagcggcagtggatctgggacagaattcactctcacaatcagcagcctgcagcctgaagatttcgcaacttattactgtctacagcataataattaccccttcactttcggccaagggaccaaagtggatatcaaacga

SEQ ID NO: 1609 - DNA, 324 bp, synthetic construct; identical to SEQ ID NO: 1599
  source 1..324: mol_type = other DNA

SEQ ID NO: 1610 - DNA, 321 bp, synthetic construct
  source 1..321: mol_type = other DNA
gacatccagatgacccagtctccatcctccctgtctgcatctgtaggagacagagtcaccatcacttgccaggcgagtcaggacattagcaactatttaaattggtatcagcagaaaccagggaaagcccctaagctcctgatctacgatgcatccaatttggaaacaggggtcccatcaaggttcagtggaagtggatctgggacagattttagtctcaccatcagcagcctgcagcctgaagattttgcaacatattactgtcaacagtatgatattctcctcactttcggcggagggaccaaggtggagatcaagcga

SEQ ID NO: 1611 - DNA, 321 bp, synthetic construct; identical to SEQ ID NO: 1610
  source 1..321: mol_type = other DNA

SEQ ID NO: 1612 - DNA, 321 bp, synthetic construct
  source 1..321: mol_type = other DNA
gacatccagatgacccagtctccatcctccctgtctgcatctgtaggagacagagtcaccatcacttgccaggcgagtcaggacattagcaactatttaaattggtatcagcagaaaccagggaaagcccctaagctcctgatctacgatgcatccaatttggaaacaggggtcccatcaaggttcagtggaagtggatctgggacagattttagtctcaccatcagcagcctgcagcctgaagatattgcaacatattactgtcaacagtatgatattctcctcactttcggcggagggaccaaggtggagatcaagcga

SEQ ID NO: 1613 - DNA, 321 bp, synthetic construct
  source 1..321: mol_type = other DNA
gacatccagatgacccagtctccatcctccctgtctgcatctgtaggagacagagtcaccatcacttgccaggcgagtcaggacattagcaactatttaaattggtatcagcagaaaccagggaaagcccctaagctcctgatctacgatgcatccaatttggaaacaggggtcccatcaaggttcagtggaagtggatctgggacagattttagtttcaccatcagcagcctgcagcctgaagattttgcaacatattactgtcaacagtatgatattctcctcactttcggcggagggaccaaggtggagatcaagcga

SEQ ID NO: 1614 - DNA, 321 bp, synthetic construct; identical to SEQ ID NO: 1612
  source 1..321: mol_type = other DNA

SEQ ID NO: 1615 - DNA, 321 bp, synthetic construct; identical to SEQ ID NO: 1613
  source 1..321: mol_type = other DNA

SEQ ID NO: 1616 - DNA, 321 bp, synthetic construct; identical to SEQ ID NO: 1574
  source 1..321: mol_type = other DNA

SEQ ID NO: 1617 - DNA, 321 bp, synthetic construct; identical to SEQ ID NO: 1610
  source 1..321: mol_type = other DNA

SEQ ID NO: 1618 - DNA, 321 bp, synthetic construct; identical to SEQ ID NO: 1610
  source 1..321: mol_type = other DNA

SEQ ID NO: 1619 - DNA, 324 bp, synthetic construct; identical to SEQ ID NO: 1572
  source 1..324: mol_type = other DNA

SEQ ID NO: 1620 - DNA, 324 bp, synthetic construct; identical to SEQ ID NO: 1572
  source 1..324: mol_type = other DNA

SEQ ID NO: 1621 - DNA, 324 bp, synthetic construct; identical to SEQ ID NO: 1591
  source 1..324: mol_type = other DNA

SEQ ID NO: 1622 - DNA, 324 bp, synthetic construct; identical to SEQ ID NO: 1591
  source 1..324: mol_type = other DNA

SEQ ID NO: 1623 - DNA, 324 bp, synthetic construct; identical to SEQ ID NO: 1593
  source 1..324: mol_type = other DNA

SEQ ID NO: 1624 - DNA, 324 bp, synthetic construct; identical to SEQ ID NO: 1593
  source 1..324: mol_type = other DNA

SEQ ID NO: 1625 - DNA, 324 bp, synthetic construct; identical to SEQ ID NO: 1593
  source 1..324: mol_type = other DNA

SEQ ID NO: 1626 - DNA, 321 bp, synthetic construct
  source 1..321: mol_type = other DNA
gacatccagatgacccagtctccatcctccctgtctgcatctgtgggggacagagtcaccatcacttgccaggcgagtcaggacattaccaactatttaaattggtatcagcagaaaccagggaaagcccctaaactcctgatctacgatgcttccaatttggagccaggggtcccatcaaggttcagtggaagtggatctgggacagattttactctcaccatcagcagcctgcagcctgaagattttgcaacatattactgtcaacagtatgatgatctattcactttcggccctgggaccaaagtggatatcaaacga

SEQ ID NO: 1627 - DNA, 321 bp, synthetic construct
  source 1..321: mol_type = other DNA
gacatccagatgacccagtctccatcctccctgtctgcatctgtgggggacagagtcaccatcacttgccaggcgagtcaggacattaccaactatttaaattggtatcagcagaaaccagggaaagcccctaaactcctgatctacgatgcttccaatttggagccaggggtcccatcaaggttcagtggaagtggatctgggacagattttactctcaccatcagcagcctgcagcctgaagatattgcaacatattactgtcaacagtatgatgatctattcactttcggccctgggaccaaagtggatatcaaacga

SEQ ID NO: 1628 - DNA, 321 bp, synthetic construct; identical to SEQ ID NO: 1626
  source 1..321: mol_type = other DNA

SEQ ID NO: 1629 - DNA, 321 bp, synthetic construct
  source 1..321: mol_type = other DNA
gacatccagatgacccagtctccatcctccctgtctgcatctgtgggggacagagtcaccatcacttgccaggcgagtcaggacattaccaactatttaaattggtatcagcagaaaccagggaaagcccctaaactcctgatctacgatgcttccaatttggagccaggggtcccatcaaggttcagtggaagtggatctgggacagattttactttcaccatcagcagcctgcagcctgaagattttgcaacatattactgtcaacagtatgatgatctattcactttcggccctgggaccaaagtggatatcaaacga

SEQ ID NO: 1630 - DNA, 321 bp, synthetic construct; identical to SEQ ID NO: 1627
  source 1..321: mol_type = other DNA

SEQ ID NO: 1631 - DNA, 321 bp, synthetic construct; identical to SEQ ID NO: 1629
  source 1..321: mol_type = other DNA

SEQ ID NO: 1632 - DNA, 321 bp, synthetic construct; identical to SEQ ID NO: 1582
  source 1..321: mol_type = other DNA

SEQ ID NO: 1633 - DNA, 321 bp, synthetic construct; identical to SEQ ID NO: 1626
  source 1..321: mol_type = other DNA

SEQ ID NO: 1634 - DNA, 321 bp, synthetic construct; identical to SEQ ID NO: 1626
  source 1..321: mol_type = other DNA

SEQ ID NO: 1635 - DNA, 321 bp, synthetic construct
  source 1..321: mol_type = other DNA
gacatccagatgacccagtctccatcctccctgtctgcatctgtgggggacagagtcaccatcacttgccaggcgagtcaggacattaccaactatttaaattggtatcagcagaaaccagggaaagcccctaaactcctgatctacgatgcttccaatttggagccaggggtcccatcaaggttcagtggaagtggatctgggacagattttactctcaccatcagcagcctgcagcctgaagattttgcaacatattactgtcaacagtatgatgatctattcactttcggccaagggaccaaagtggatatcaaacga

SEQ ID NO: 1636 - DNA, 321 bp, synthetic construct; identical to SEQ ID NO: 1635
  source 1..321: mol_type = other DNA

SEQ ID NO: 1637 - DNA, 324 bp, synthetic construct
  source 1..324: mol_type = other DNA
gaaattgtgttgacgcagtctccaggcaccctgtctttgtctccaggggaaagagccaccctctcctgcagggccagtcagatttttaccagcacctacttagcctggtaccagcagaaacctggccaggctcccaggctcctcatctatggtgcatccagcagggccactggcatcccagacaggttcagtggcagtgggtctgggacagacttcactctcaccatcagcagattggagcctgaagattttgcagtgtattactgtcagcagtatggtagctcacctcgcttcggccaagggacacgactggagattaaacga

SEQ ID NO: 1638 - DNA, 324 bp, synthetic construct; identical to SEQ ID NO: 1637
  source 1..324: mol_type = other DNA

SEQ ID NO: 1639 - DNA, 324 bp, synthetic construct; identical to SEQ ID NO: 1637
  source 1..324: mol_type = other DNA

SEQ ID NO: 1640 - DNA, 324 bp, synthetic construct; identical to SEQ ID NO: 1637
  source 1..324: mol_type = other DNA

SEQ ID NO: 1641 - DNA, 324 bp, synthetic construct
  source 1..324: mol_type = other DNA
gaaatagtgatgacgcagtctccagccaccctgtctgtgtctccaggggaaagagccaccctctcctgcagggccagtcagagtgttagcagcaacttagcctggtaccagcagaaacctggccaggctcccaggctcctcatctatggtgcagccaccagggccactggtatcccagccaggttcagtggcagtgggtctgggacagagttcactctcaccatcagcagcctgcagtctgaagattttgcagtttattactgtcagcagtataataactggcctctcactttcggcggagggaccaaggtggagatcaaacga

SEQ ID NO: 1642 - DNA, 324 bp, synthetic construct; identical to SEQ ID NO: 1641
  source 1..324: mol_type = other DNA

SEQ ID NO: 1643 - DNA, 324 bp, synthetic construct; identical to SEQ ID NO: 1641
  source 1..324: mol_type = other DNA

SEQ ID NO: 1644 - DNA, 324 bp, synthetic construct; identical to SEQ ID NO: 1580
  source 1..324: mol_type = other DNA

SEQ ID NO: 1645 - DNA, 324 bp, synthetic construct
  source 1..324: mol_type = other DNA
gaaatagtgatgacgcagtctccagccaccctgtctgtgtctccaggggaaagagccaccctctcctgcagggccagtcagagtgttagcagcaacttagcctggtaccagcagaaacctggccaggctcccaggctcctcatctatggtgcagccaccagggccactggtatcccagccaggttcagtggcagtgggtctgggacagagttcactctcaccatcagcagcctggagcctgaagattttgcagtttattactgtcagcagtataataacttccctctcactttcggcggagggaccaaggtggagatcaaacga

SEQ ID NO: 1646 - DNA, 324 bp, synthetic construct
  source 1..324: mol_type = other DNA
gaaatagtgatgacgcagtctccagccaccctgtctgtgtctccaggggaaagagccaccctctcctgcagggccagtcagagtgttagcagcaacttagcctggtaccagcagaaacctggccaggctcccaggctcctcatctatggtgcagccaccagggccactggtatcccagccaggttcagtggcagtgggtctgggacagagttcactctcaccatcagcagcctggagcctgaagattttgcagtttattactgtcagcagtataataactatcctctcactttcggcggagggaccaaggtggagatcaaacga

SEQ ID NO: 1647 - DNA, 324 bp, synthetic construct
  source 1..324: mol_type = other DNA
gaaatagtgatgacgcagtctccagccaccctgtctgtgtctccaggggaaagagccaccctctcctgcagggccagtcagagtgttagcagcaacttagcctggtaccagcagaaacctggccaggctcccaggctcctcatctatggtgcagccaccagggccactggtatcccagccaggttcagtggcagtgggtctgggacagagttcactctcaccatcagcagcctggagcctgaagattttgcagtttattactgtcagcagtataataactggcctctcactttcggcggagggaccaaggtggagatcaaacga

SEQ ID NO: 1648 - DNA, 324 bp, synthetic construct; identical to SEQ ID NO: 1647
  source 1..324: mol_type = other DNA

SEQ ID NO: 1649 - DNA, 327 bp, synthetic construct
  source 1..327: mol_type = other DNA
gaaattgtgttgacgcagtctccaggcaccctgtctttgtctccaggggaaagagccaccctctcctgcagggccagtcagagtattagttacagttacttagcctggtaccagcagaaacctggccaggctccccggctcctcatctatggtgcatccagcagggccactggcatcccagacaggttcagtggcagtgggtctgggacagacttcactctcaccatcagcagactggagcctgatgattttgcagtgtattactgtcagcagtatggtagttcaccgctcactttcggcggagggaccaaggtggagatcaaacga

SEQ ID NO: 1650 - DNA, 327 bp, synthetic construct; identical to SEQ ID NO: 1579
  source 1..327: mol_type = other DNA

SEQ ID NO: 1651 - DNA, 327 bp, synthetic construct; identical to SEQ ID NO: 1649
  source 1..327: mol_type = other DNA

SEQ ID NO: 1652 - DNA, 327 bp, synthetic construct; identical to SEQ ID NO: 1649
  source 1..327: mol_type = other DNA

SEQ ID NO: 1653 - DNA, 327 bp, synthetic construct; identical to SEQ ID NO: 1649
  source 1..327: mol_type = other DNA

SEQ ID NO: 1654 - DNA, 327 bp, synthetic construct; identical to SEQ ID NO: 1579
  source 1..327: mol_type = other DNA

SEQ ID NO: 1655 - DNA, 327 bp, synthetic construct; identical to SEQ ID NO: 1579
  source 1..327: mol_type = other DNA

SEQ ID NO: 1656 - DNA, 342 bp, synthetic construct; identical to SEQ ID NO: 1575
  source 1..342: mol_type = other DNA

SEQ ID NO: 1657 - DNA, 342 bp, synthetic construct; identical to SEQ ID NO: 1575
  source 1..342: mol_type = other DNA

SEQ ID NO: 1658 - DNA, 342 bp, synthetic construct; identical to SEQ ID NO: 1575
  source 1..342: mol_type = other DNA

SEQ ID NO: 1659 - DNA, 342 bp, synthetic construct; identical to SEQ ID NO: 1575
  source 1..342: mol_type = other DNA

SEQ ID NO: 1660 - DNA, 342 bp, synthetic construct; identical to SEQ ID NO: 1575
  source 1..342: mol_type = other DNA

SEQ ID NO: 1661 - DNA, 342 bp, synthetic construct; identical to SEQ ID NO: 1575
  source 1..342: mol_type = other DNA

SEQ ID NO: 1662 - DNA, 342 bp, synthetic construct; identical to SEQ ID NO: 1575
  source 1..342: mol_type = other DNA

SEQ ID NO: 1663 - DNA, 342 bp, synthetic construct; identical to SEQ ID NO: 1575
  source 1..342: mol_type = other DNA

SEQ ID NO: 1664 - DNA, 342 bp, synthetic construct; identical to SEQ ID NO: 1575
  source 1..342: mol_type = other DNA

SEQ ID NO: 1665 - DNA, 342 bp, synthetic construct
  source 1..342: mol_type = other DNA
gacatcgtgatgacccagtctccagactccctggctgtgtctctgggcgagagggccaccatcaactgcaagtccagccagagtgttttatccagctccaacaataagaactacatagcttggtaccagcagaaaccaggacaacctcctaagctgctcatttactgggcatctacccgggaatccggggtccctgaccgattcagtggcagcgggtctgggacagatttcactctcaccatcagcagcctgcaggctgaagatgtggcagttttttactgtcaacaatattatagtactccgtggacgttcggccaagggaccaaggtggaaatcaaacga

SEQ ID NO: 1666 - DNA, 342 bp, synthetic construct; identical to SEQ ID NO: 1665
  source 1..342: mol_type = other DNA

SEQ ID NO: 1667 - DNA, 342 bp, synthetic construct
  source 1..342: mol_type = other DNA
gacatcgtgatgacccagtctccagactccctgtctgtgtctctgggcgagagggccaccatcaactgcaagtccagccagagtgttttatccagctccaacaataagaactacttagcttggtaccaacagaaaccaggacagcctcctaacctgctcatttactggacttctacccgagaatccggggtccctgaccgattcagtggcagcgggtctgggacagatttcactctcaccatcaacagcctgcaggctgaagatgtggctgtttattactgtcagcaatattatcgtactccgtggacgttcggccaagggaccaaggtggaaatcaaacga

SEQ ID NO: 1668 - DNA, 342 bp, synthetic construct; identical to SEQ ID NO: 1667
  source 1..342: mol_type = other DNA

SEQ ID NO: 1669 - DNA, 342 bp, synthetic construct; identical to SEQ ID NO: 1577
  source 1..342: mol_type = other DNA

SEQ ID NO: 1670 - DNA, 342 bp, synthetic construct; identical to SEQ ID NO: 1667
  source 1..342: mol_type = other DNA

SEQ ID NO: 1671 - DNA, 342 bp, synthetic construct; identical to SEQ ID NO: 1667
  source 1..342: mol_type = other DNA

SEQ ID NO: 1672 - DNA, 342 bp, synthetic construct; identical to SEQ ID NO: 1577
  source 1..342: mol_type = other DNA

SEQ ID NO: 1673 - DNA, 342 bp, synthetic construct; identical to SEQ ID NO: 1577
  source 1..342: mol_type = other DNA

SEQ ID NO: 1674 - DNA, 342 bp, synthetic construct
  source 1..342: mol_type = other DNA
gacatcgtgatgacccagtctccagactccctggctgtgtctctgggcgagagggccaccatcaactgcaagtccagccagagtgttttatccagctccaacaataagaactacttagcttggtaccaacagaaaccaggacagcctcctaaactgctcatttactggacttctacccgagaatccggggtccctgaccgattcagtggcagcgggtctgggacagatttcactctcaccatcaacagcctgcaggctgaagatgtggctgtttattactgtcagcaatattatcgtactccgtggacgttcggccaagggaccaaggtggaaatcaaacga

SEQ ID NO: 1675 - DNA, 342 bp, synthetic construct; identical to SEQ ID NO: 1667
  source 1..342: mol_type = other DNA

SEQ ID NO: 1676 - DNA, 342 bp, synthetic construct; identical to SEQ ID NO: 1576
  source 1..342: mol_type = other DNA

SEQ ID NO: 1677 - DNA, 342 bp, synthetic construct; identical to SEQ ID NO: 1576
  source 1..342: mol_type = other DNA

SEQ ID NO: 1678 - DNA, 342 bp, synthetic construct; identical to SEQ ID NO: 1576
  source 1..342: mol_type = other DNA

SEQ ID NO: 1679 - DNA, 342 bp, synthetic construct; identical to SEQ ID NO: 1665
  source 1..342: mol_type = other DNA

SEQ ID NO: 1680 - DNA, 342 bp, synthetic construct; identical to SEQ ID NO: 1665
  source 1..342: mol_type = other DNA

SEQ ID NO: 1681 - DNA, 342 bp, synthetic construct; identical to SEQ ID NO: 1578
  source 1..342: mol_type = other DNA

SEQ ID NO: 1682 - DNA, 342 bp, synthetic construct; identical to SEQ ID NO: 1578
  source 1..342: mol_type = other DNA

SEQ ID NO: 1683 - DNA, 342 bp, synthetic construct; identical to SEQ ID NO: 1578
  source 1..342: mol_type = other DNA

SEQ ID NO: 1684 - DNA, 342 bp, synthetic construct; identical to SEQ ID NO: 1578
  source 1..342: mol_type = other DNA

SEQ ID NO: 1685 - DNA, 342 bp, synthetic construct; identical to SEQ ID NO: 1578
  source 1..342: mol_type = other DNA

SEQ ID NO: 1686 - DNA, 342 bp, synthetic construct; identical to SEQ ID NO: 1578
  source 1..342: mol_type = other DNA

SEQ ID NO: 1687 - DNA, 342 bp, synthetic construct; identical to SEQ ID NO: 1578
  source 1..342: mol_type = other DNA

SEQ ID NO: 1688 - DNA, 342 bp, synthetic construct
  source 1..342: mol_type = other DNA
gacatcgtgatgacccagtctccagactccctgtctgtgtctctgggcgagagggccaccatcaactgcaagtccagccagagtgttttatccagctccaacaataagaactacttagcttggtaccagcagaaaccaggacagcctcctaacctgctcatttactggacttctacccgagaatccggggtccctgaccgattcagtggcagcgggtctgggacagatttcactctcaccatcaacagcctgcaggctgaagatgtggctgtttattactgtcagcaatattatcgtactccgtggacgttcggccaagggaccaaggtggaaatcaaacga

SEQ ID NO: 1689 - DNA, 342 bp, synthetic construct; identical to SEQ ID NO: 1688
  source 1..342: mol_type = other DNA

SEQ ID NO: 1690 - DNA, 342 bp, synthetic construct; identical to SEQ ID NO: 1688
  source 1..342: mol_type = other DNA

SEQ ID NO: 1691 - DNA, 342 bp, synthetic construct; identical to SEQ ID NO: 1688
  source 1..342: mol_type = other DNA

SEQ ID NO: 1692 - DNA, 342 bp, synthetic construct
  source 1..342: mol_type = other DNA
gacatcgtgatgacccagtctccagactccctggctgtgtctctgggcgagagggccaccatcaactgcaagtccagccagagtgttttatccagctccaacaataagaactacttagcttggtaccagcagaaaccaggacagcctcctaaactgctcatttactggacttctacccgagattccggggtccctgaccgattcagtggcagcgggtctgggacagatttcactctcaccatcaacagcctgcaggctgaagatgtggctgtttattactgtcagcaatattatcgtactccgtggacgttcggccaagggaccaaggtggaaatcaaacga

SEQ ID NO: 1693 - DNA, 342 bp, synthetic construct
  source 1..342: mol_type = other DNA
gacatcgtgatgacccagtctccagactccctggctgtgtctctgggcgagagggccaccatcaactgcaagtccagccagagtgttttatccagctccaacaataagaactacttagcttggtaccagcagaaaccaggacagcctcctaaactgctcatttactggacttctacccgagaatccggggtccctgaccgattcagtggcagcgggtctgggacagatttcactctcaccatcaacagcctgcaggctgaagatgtggctgtttattactgtcagcaatattatcgtactccgtggacgttcggccaagggaccaaggtggaaatcaaacga

SEQ ID NO: 1694 - DNA, 333 bp, synthetic construct
  source 1..333: mol_type = other DNA
cagtctgtgctgactcagccaccctcagcgtctgggacccccgggcagagggtcaccatctcttgttctggaagtagctccaacatcggaagtcaaactgtaaactggtaccagcacctcccaggaacggcccccaaactcctcatctatactaataatcagcggccctcaggggtccctgaccgattctctggctccaagtctggcacctcagcctcccttgccatcagtgggctccagtctgaggatgaggctgattatttctgtgcaacattcgatgaaagcctgagtggtccggtattcggcggagggaccaagctgaccgtcctaggt

SEQ ID NO: 1695 - DNA, 333 bp, synthetic construct
  source 1..333: mol_type = other DNA
cagtctgtgctgactcagccaccctcagcgtctgggacccccgggcagagggtcaccatctcttgttctggaagtagctccaacatcggaagtcaaactgtaaactggtaccagcacctcccaggaacggcccccaaactcctcatctatactaataatcagcggccctcaggggtccctgaccgattctctggctccaagtctggcacctcagcctcccttgccatcagtgggctccagtctgaggatgaggctgattatttctgtgcaacattcgatgaaagcctgcaaggtccggtattcggcggagggaccaagctgaccgtcctaggt

SEQ ID NO: 1696 - DNA, 333 bp, synthetic construct
  source 1..333: mol_type = other DNA
cagtctgtgctgactcagccaccctcagcgtctgggacccccgggcagagggtcaccatctcttgttctggaagtagctccaacatcggaagtaattatgtaaactggtaccagcacctcccaggaacggcccccaaactcctcatctatactaataatcagcggccctcaggggtccctgaccgattctctggctccaagtctggcacctcagcctcccttgccatcagtgggctccagtctgaggatgaggctgattatttctgtgcaacattcgatgaaagcctgagtggtccggtattcggcggagggaccaagctgaccgtcctaggt

SEQ ID NO: 1697 - DNA, 333 bp, synthetic construct
  source 1..333: mol_type = other DNA
cagtctgtgctgactcagccaccctcagcgtctgggacccccgggcagagggtcaccatctcttgttctggaagtagctccaacatcggaagtaattatgtaaactggtaccagcacctcccaggaacggcccccaaactcctcatctatactaataatcagcggccctcaggggtccctgaccgattctctggctccaagtctggcacctcagcctcccttgccatcagtgggctccagtctgaggatgaggctgattatttctgtgcaacattcgatgaaagcctgcaaggtccggtattcggcggagggaccaagctgaccgtcctaggt

SEQ ID NO: 1698 - DNA, 333 bp, synthetic construct
  source 1..333: mol_type = other DNA
cagtctgtgctgactcagccaccctcagcgtctgggacccccgggcagagggtcaccatctcttgttctggaagtagctccaacatcggaagtcaaactgtaaactggtaccagcacctcccaggaacggcccccaaactcctcatctatactaataatcagcggccctcaggggtccctgaccgattctctggctccaagtctggcacctcagcctcccttgccatcagtgggctccagtctgaggatgaggctgattatttctgtgcaacattcgatgacagcctgaatggtccggtattcggcggagggaccaagctgaccgtcctaggt

SEQ ID NO: 1699 - DNA, 333 bp, synthetic construct
  source 1..333: mol_type = other DNA
cagtctgtgctgactcagccaccctcagcgtctgggacccccgggcagagggtcaccatctcttgttctggaagtagctccaacatcggaagtaattatgtaaactggtaccagcacctcccaggaacggcccccaaactcctcatctatactaataatcagcggccctcaggggtccctgaccgattctctggctccaagtctggcacctcagcctcccttgccatcagtgggctccagtctgaggatgaggctgattatttctgtgcaacattcgatgacagcctgaatggtccggtattcggcggagggaccaagctgaccgtcctaggt

SEQ ID NO: 1700 - DNA, 333 bp, synthetic construct
  source 1..333: mol_type = other DNA
cagtctgtgctgactcagccaccctcagcgtctgggacccccgggcagagggtcaccatctcttgttctggaagtagctccaacatcggaagtaatactgtaaactggtaccagcacctcccaggaacggcccccaaactcctcatctatactaataatcagcggccctcaggggtccctgaccgattctctggctccaagtctggcacctcagcctcccttgccatcagtgggctccagtctgaggatgaggctgattatttctgtgcaacattcgatgaaagcctgaatggtccggtattcggcggagggaccaagctgaccgtcctaggt

SEQ ID NO: 1701 - DNA, 333 bp, synthetic construct
  source 1..333: mol_type = other DNA
cagtctgtgctgactcagccaccctcagcgtctgggacccccgggcagagggtcaccatctcttgttctggaagtagctccaacatcggaagtaatactgtaaactggtaccagcacctcccaggaacggcccccaaactcctcatctatactaataatcagcggccctcaggggtccctgaccgattctctggctccaagtctggcacctcagcctcccttgccatcagtgggctccagtctgaggatgaggctgattatttctgtgcaacattcgatgacagcctgcaaggtccggtattcggcggagggaccaagctgaccgtcctaggt

SEQ ID NO: 1702 - DNA, 333 bp, synthetic construct
  source 1..333: mol_type = other DNA
cagtctgtgctgactcagccaccctcagcgtctgggacccccgggcagagggtcaccatctcttgttctggaagtagctccaacatcggaagtaatactgtaaactggtaccagcacctcccaggaacggcccccaaactcctcatctatactaataatcagcggccctcaggggtccctgaccgattctctggctccaagtctggcacctcagcctcccttgccatcagtgggctccagtctgaggatgaggctgattatttctgtgcaacattcgatgacagcctgagtggtccggtattcggcggagggaccaagctgaccgtcctaggt

SEQ ID NO: 1703 - DNA, 333 bp, synthetic construct
  source 1..333: mol_type = other DNA
cagtctgtgctgactcagccaccctcagcgtctgggacccccgggcagagggtcaccatctcttgttctggaagtagctccaacatcggaagtaatactgtaaactggtaccagcacctcccaggaacggcccccaaactcctcatctatactaataatcagcggccctcaggggtccctgaccgattctctggctccaagtctggcacctcagcctcccttgccatcagtgggctccagtctgaggatgaggctgattatttctgtgcaacattcgatgacagcctgaatgctccggtattcggcggagggaccaagctgaccgtcctaggt

SEQ ID NO: 1704 - DNA, 333 bp, synthetic construct
  source 1..333: mol_type = other DNA
cagtctgtgctgactcagccaccctcagcgtctgggacccccgggcagagggtcaccatctcttgttctggaagtagctccaacatcggaagtaatactgtaaactggtaccagcacctcccaggaacggcccccaaactcctcatctatactaataatcagcggccctcaggggtccctgaccgattctctggctccaagtctggcacctcagcctcccttgccatcagtgggctccagtctgaggatgaggctgattatttctgtgcaacattcgatagcagcctgaatggtccggtattcggcggagggaccaagctgaccgtcctaggt

SEQ ID NO: 1705 - DNA, 333 bp, synthetic construct
  source 1..333: mol_type = other DNA
cagtctgtgctgactcagccaccctcagcgtctgggacccccgggcagagggtcaccatctcttgttctggaagtagctccaacatcggaagtaattatgtaaactggtaccagcacctcccaggaacggcccccaaactcctcatctatactaataatcagcggccctcaggggtccctgaccgattctctggctccaagtctggcacctcagcctcccttgccatcagtgggctccagtctgaggatgaggctgattatttctgtgcaacattcgatagcagcctgaatgctccggtattcggcggagggaccaagctgaccgtcctaggt

SEQ ID NO: 1706 - DNA, 333 bp, synthetic construct; identical to SEQ ID NO: 1705
  source 1..333: mol_type = other DNA

SEQ ID NO: 1707 - DNA, 333 bp, synthetic construct; identical to SEQ ID NO: 1694
  source 1..333: mol_type = other DNA

SEQ ID NO: 1708 - DNA, 324 bp, synthetic construct
  source 1..324: mol_type = other DNA
gacatccagatgacccagtctccatcctccctgtctgcatctataggagacagagtcaccatcacttgccgggcaagtcaggaccttagaaattatttaggctggtatcaacagaaaccagggaaagcccctaagcgcctgatctatggtgcatccagtttgcaaagtggggtcccttcaaggttcagcggcagtggatctgggacagaattcactctcacaatcagcagcctgcagcctgaagatttcgcaacttattactgtctacagcataataattaccccttcactttcggccaagggaccaaagtggatatcaaacga

SEQ ID NO: 1709 - DNA, 324 bp, synthetic construct; identical to SEQ ID NO: 1592
  source 1..324: mol_type = other DNA

SEQ ID NO: 1710 - DNA, 333 bp, synthetic construct
  source 1..333: mol_type = other DNA
cagtctgtgctgactcagccaccctcagcgtctgggacccccgggcagagggtcaccatctcttgttctggaagtagctccaacatcggaagtaatactgtaaactggtaccagcaactcccaggaacggcccccaaactcctcatctatactaataatcagcggccctcaggggtccctgaccgattctctggctccaagtctggcacctcagcctcccttgccatcagtgggctccagtctgaggatgaggctgattatttctgtgcaacattcgatagcagcctgagtggtccggtattcggcggagggaccaagctgaccgtcctaggt

SEQ ID NO: 1711 - DNA, 324 bp, synthetic construct
  source 1..324: mol_type = other DNA
gacatccagctgacccagtctccatcctccctgtctgcatctgtaggagacagagtcactatcacttgccgggcaagtcagaccattagcaggtttttaaattggtatcagcagaaacctgggaaagcccctgagctcctgatctatgttgcatccagtttgcaaagtggggtcccatcaagattcagtggcagtggttctgggacagatttcactctcaccatcagcagtctgcaacctgaagattttgcaacttactactgtcaacagagttacagtaccctgatcagttttggccaggggaccaagctggagatcacacga

SEQ ID NO: 1712 - DNA, 333 bp, synthetic construct
  source 1..333: mol_type = other DNA
cagtctgtgttgacgcagccgccctcagtgtctgcggccccaggacagaaggtcaccatctcctgctctggaagcagctccaacattggaaataattatgtatcctggtatgagcagttcccaggaacagcccccaaactcctcatttatgacaataataagcgaccctcagggattcctgaccgattctctggctccaagtctggcacgtcagccaccctgggcatcaccggactccagactggggacgaggccgattattactgcggaacatgggatagcagcctgagtgctgtggtattcggcggagggaccaaactgaccgtcctaggt

SEQ ID NO: 1713 - DNA, 324 bp, synthetic construct
  source 1..324: mol_type = other DNA
gacatccagctgacccagtctccatcctccctgtctgcatctgtaggagacagagtcactatcacttgccgggcaagtcagaccattagcaggtttttaaattggtatcagcagaaacctgggaaagcccctgagctcctgatctatgttgcatccagtttgcaaagtggggtcccatcaagattcagtggcagtggttctgggacagatttcactctcaccatcagcagtctgcaacctgaagattttgcaacttactactgtcaacagagttacagtaccctgatcagttttggccaggggaccaagctggagatcaaacga

SEQ ID NO: 1714 - DNA, 324 bp, synthetic construct; identical to SEQ ID NO: 1713
  source 1..324: mol_type = other DNA

SEQ ID NO: 1715 - DNA, 324 bp, synthetic construct; identical to SEQ ID NO: 1711
  source 1..324: mol_type = other DNA

SEQ ID NO: 1716 - DNA, 324 bp, synthetic construct
  source 1..324: mol_type = other DNA
gacatccagctgacccagtctccatcctccctgtctgcatctgtaggagacagagtcactatcacttgccgggcaagtcagaccattagcaggtttttaaattggtatcagcagaaacctgggaaagcccctaagctcctgatctatgttgcatccagtttgcaaagtggggtcccatcaagattcagtggcagtggttctgggacagatttcactctcaccatcagcagtctgcaacctgaagattttgcaacttactactgtcaacagagttacagtaccctgatcagttttggccaggggaccaagctggagatcaaacga

SEQ ID NO: 1717 - DNA, 324 bp, synthetic construct; identical to SEQ ID NO: 1713
  source 1..324: mol_type = other DNA

SEQ ID NO: 1718 - DNA, 324 bp, synthetic construct; identical to SEQ ID NO: 1713
  source 1..324: mol_type = other DNA

SEQ ID NO: 1719 - DNA, 333 bp, synthetic construct
  source 1..333: mol_type = other DNA
cagtctgtgttgacgcagccgccctcagtgtctgcggccccaggacagaaggtcaccatctcctgctctggaagcagctccaacattggaaataattatgtatcctggtatcagcagctcccaggaacagcccccaaactcctcatttatgacaataataagcgaccctcagggattcctgaccgattctctggctccaagtctggcacgtcagccaccctgggcatcaccggactccagactggggacgaggccgattattactgcggaacatgggatagcagcctgagtgctgtggtattcggcggagggaccaaactgaccgtcctaggt

SEQ ID NO: 1720 - DNA, 333 bp, synthetic construct; identical to SEQ ID NO: 1719
  source 1..333: mol_type = other DNA

SEQ ID NO: 1721 - DNA, 333 bp, synthetic construct; identical to SEQ ID NO: 1712
  source 1..333: mol_type = other DNA

SEQ ID NO: 1722 - DNA, 333 bp, synthetic construct
  source 1..333: mol_type = other DNA
cagtctgtgttgacgcagccgccctcagtgtctgcggccccaggacagaaggtcaccatctcctgctctggaagcagctccaacattggaaataattatgtatcctggtatcagcagctcccaggaacagcccccaaactcctcatttatgacaataataagcgaccctcagggattcctgaccgattctctggctccaagtctggcacgtcagccaccctggccatcaccggactccagactggggacgaggccgattattactgcggaacattcgaaagcagcctgagtgctgtggtattcggcggagggaccaaactgaccgtcctaggt

SEQ ID NO: 1723 - DNA, 333 bp, synthetic construct
  source 1..333: mol_type = other DNA
cagtctgtgttgacgcagccgccctcagtgtctgcggccccaggacagaaggtcaccatctcctgctctggaagcagctccaacattggaaataattatgtatcctggtatcagcagctcccaggaacagcccccaaactcctcatttatgacaataataagcgaccctcagggattcctgaccgattctctggctccaagtctggcacgtcagccaccctggccatcaccggactccagactggggacgaggccgattattactgcggaacatgggatagcagcctgagtgctgtggtattcggcggagggaccaaactgaccgtcctaggt

SEQ ID NO: 1724 - DNA, 333 bp, synthetic construct; identical to SEQ ID NO: 1723
  source 1..333: mol_type = other DNA

SEQ ID NO: 1725 - DNA, 333 bp, synthetic construct; identical to SEQ ID NO: 1719
  source 1..333: mol_type = other DNA

SEQ ID NO: 1726 - DNA, 333 bp, synthetic construct; identical to SEQ ID NO: 1722
  source 1..333: mol_type = other DNA

SEQ ID NO: 1727 - DNA, 324 bp, synthetic construct
  source 1..324: mol_type = other DNA
gacatccagctgacccagtctccatcctccctgtctgcatctgtaggagacagagtcactatcacttgccgggcaagtcagaccattagcaggtttttaaattggtatcagcagaaacctgggaaagcccctaagctcctgatctatgttgcatccagtttgcaaagtggggtcccatcaagattcagtggcagtggttctgggacagatttcactctcaccatcagcagtctgcaacctgaagattttgcaacttactactgtcaacagagttacagtaccctgctcagttttggccaggggaccaagctggagatcaaacga

SEQ ID NO: 1728 - DNA, 384 bp, synthetic construct
  source 1..384: mol_type = other DNA
cagatgcaggtggtgcagtctggggctgaggtgaagaagcctggggcctcagtgaaggtctcctgcaaggcttccggatacaccttcaccggctactatatgcattgggtgcgacaggcccctggacaagggcttgagtggatgggatggatcaaccctaacagtggtggcacaaactatgcacagaagtttcagggcagggtcaccatgaccagggacacgtccatcagtacagcctacatggagctgagcaggctgaggtctgacgacacggccgtgtattactgtgcgagagggggggattacgtttgggggacttatcggcctcactactactacggtatggacgtctggggccaagggaccacggtcaccgtctcctca

SEQ ID NO: 1729 - DNA, 363 bp, synthetic construct
  source 1..363: mol_type = other DNA
caggtgcagctggtggagtctgggggaggcgtggtccagcctgggaggtccctgagactctcctgtgcagcgtctggattcactttcagtaactttggcatgcactgggtccgccaggctccaggcaaggggctggagtgggtggcagttatatggtatgatggaagtaatgaaaactatgcagactccgtgaagggccgattcaccatctccagagacaattccaagaatacgctgtatctgcacatgaacagcctgagagtcgcggacacggctgtgtattattgtgcgcgagatgggacgatctttggagtggtcttgggggactactggggccagggaaccctggtcaccgtctcctca

SEQ ID NO: 1730 - DNA, 363 bp, synthetic construct
  source 1..363: mol_type = other DNA
caggtgcagctggtggagtctgggggaggcgtggtccagcctgggaggtccctgagactctcctgtgcagcgtctggattcaccttcagttactttggcatgcactgggtccgccaggctccaggcaaggggctggagtgggtggcagttatatggtatgatggaagtaataaatactatgcagactccgtgaagggccgcttcaccatctccagagacaattccaagaacacgctgtatctgcaaatgaacagcctgagagccgaggacacggctgtgtattactgtgcgcgagatgggacgatttttggagtgctcttgggggactactggggccagggaaccctggtcaccgtctcctca

SEQ ID NO: 1731 - DNA, 360 bp, synthetic construct
  source 1..360: mol_type = other DNA
caggtgcaactggtggagtctgggggaggcgtggtccagcctgggaggtccctgagactctcctgtgcagcgtctggattcaccttcagtagctatggcatgcactgggtccgccaggctccaggcaaggggctggagtgggtggcagttatatggtatgatggaagtaataaatactatgcagactccgtgaagggccgattcaccatctccagcgacaattccaagaacacgctgtatctgcaaatgaacagcctgagagccgaggacacggctgtgtattactgtgcgagagataggacgatttttggagtggttcttgactactggggccagggaaccctggtcaccgtctcctca

SEQ ID NO: 1732 - DNA, 369 bp, synthetic construct
  source 1..369: mol_type = other DNA
caggtgccgctggtgcagtctggggctgaggtgaagaagcctggggcctcagtgaaggtctcctgcaaggcttctggatacaccttcaccggctactatatccactgggtgcgacaggcccctggacaagggcttgagtggatggggtggatcaaccctgacagtggtggcacagactattcacagaggtttcagggcaggttcaccatgaccagggacacgtccatcagcacagcctacatggaactgaacaggctgagatctgacgacacggccgtgtattactgtgcgagagaggccacgatttttggaatggttattgtaccgtttgactactggggccagggaaccctggtcaccgtctcctca

SEQ ID NO: 1733 - DNA, 369 bp, synthetic construct
  source 1..369: mol_type = other DNA
caggtgccgctggtgcagtctggggctgaggtgaagaagcctggggcctcagtgaaggtctcctgcaaggcttctggatacaccttcaccggctactatatccactgggtgcgacaggcccctggacaaggacttgagtggatggggtggatcaaccctgacagtggtggcacagactattcacagaggtttcagggcaggttcaccatgaccagggacacgtccatcagcacagcctacatggaactgagcaggctgagatctgacgacacggccgtgtattactgtgcgagagaggccacgatttttggaatggttattgtaccgtttgactactggggccagggaaccctggtcaccgtctcctca

SEQ ID NO: 1734 - DNA, 369 bp, synthetic construct
  source 1..369: mol_type = other DNA
caggtgccgctggtacagtctggggctgaggtgaagaagcctggggcctcagtgaaggtctcctgcaaggcttctggatacaccttcaccggctactatatacactgggtgcgtcaggcccctggacaagggcttgtgtggatggggtggatcagccctaacagtggtgacacaagctatgcacagaagtttcaggacagggtcaccatgaccagggacacgtccatcagcacagcctatatggagctgagcagactgagatctgacgacacggccgtgtatttctgtacgagagaggccacgatttttggaatgcttattgtaccatttgactactggggccagggaaccctggtcaccgtctcctca

SEQ ID NO: 1735 - DNA, 369 bp, synthetic construct
  source 1..369: mol_type = other DNA
caggtgccgctggtgcagtctggggctgaggtgaagaagcctggggcctcagtgaaggtctcctgcaaggcttctggatacaccttcaccggctactatatacactgggtgcgtcaggcccctggacaagggcttgagtggatggggtggataagccctaacaatggtgacacaaactatgcacagaagtttcaggacagggtcaccatgaccagggacacgtccatcagcacagcctatatggagctgagcaggctgagatctgacgacacggccgtgtattactgtacgagagaggccacgatttttggaatgcttattgtaccatttgactactggggccagggaaccctggtcaccgtctcctca

SEQ ID NO: 1736 - DNA, 378 bp, synthetic construct
  source 1..378: mol_type = other DNA
caggtgcagttgcaggagtcgggcccaggactggtgaagccttcacagaccctgtccctcacctgcactgtctctggtgactccatcagcagtggtggttactactggagctggatccgccagcacccagggaagggcctggagtggattgggtacatctattacagtgggagcacctactacaacccgtccctcaagagtcgagttaccatatcagtagacacgtctaagaaccagttctccctgaagctgagctctgtgactgccgcggacacggccgtgtattactgtgcgagagatcgtattacgatttttggagtggttatggggggcggtatggacgtctggggccaagggaccacggtcaccgtctcctca

SEQ ID NO: 1737 - DNA, 360 bp, synthetic construct
  source 1..360: mol_type = other DNA
caggtgcagctggtggagtctgggggaggcgtggtccagcctgggaggtccctgagactctcctgtgcagcatctggattcaccttcagtaactatggcatgcactgggtccgccaggctccaggcgaggggctggagtgggtggcagctatatggtttgatggaagtgataaatactatgcagactccgtgaagggccgattcaccatctccagagacaactccaagaacacgctgtatctgcaaatgaacagcctgagagccgaggacacggctgtgtattactgtgcgagagatcaggcgatttttggagtggtccccgactactggggccagggaaccctggtcaccgtctcctca

SEQ ID NO: 1738 - DNA, 363 bp, synthetic construct; identical to SEQ ID NO: 1730
  source 1..363: mol_type = other DNA

SEQ ID NO: 1739 - DNA, 360 bp, synthetic construct
  source 1..360: mol_type = other DNA
caggtgcagctggtggagtctgggggaggcgtggtccagcctgggaggtccctgagactctcctgtgcagcgtctggattctccttcagtagctatggcatgcactgggtccgccagcctccaggcaaggggctggagtgggtggcagctatatggtatgatggaaataataaatactatgcagactccgtgaagggccgattcaccatctccagagacagttccaagaacacgctgtatctgcaaatgaacagcctgagagccgaggacacggctgtgtattactgtgcgagagatcggacgatttttggagtggtccttgagtacctcggccagggaaccctggtcaccgtctcctca

SEQ ID NO: 1740 - DNA, 351 bp, synthetic construct
  source 1..351: mol_type = other DNA
caggtgcagctgcaggagtcgggcccaggactggtgaagccttcggagaccctgtccctcacctgcactgtctctcagggctccatcagtagttactactggagctggatccggcagcccgccgggaagggactagagtggattggccgtatctataccagtgggagcaccaactacaacccctccctcaagagtcgagtcaccatgtcaatagacacgtccaagaaccagttctccctgaaactgaactctgtgaccgccgcggacacggccgtgtattactgtgcgagagatgtagcagtggctggctttgactactggggccagggaaccctggtcaccgtctcctca

SEQ ID NO: 1741 - DNA, 351 bp, synthetic construct
  source 1..351: mol_type = other DNA
caggtgcagctgcaggagtcgggcccaggactggtgaagccttcggagaccctgtccctcacctgcactgtctctgggggctccatcagtagttactactggagctggatccggcagcccgccgggaagggactagagtggattggccgtatctataccagtgggagcaccaactacaacccctccctcaagagtcgagtcaccatgtcaatagacacgtccaagaaccagttctccctgaaactgaactctgtgaccgccgcggacacggccgtgtattactgtgcgagagatgtagcagtggctggctttgactactggggccagggaaccctggtcaccgtctcctca

SEQ ID NO: 1742 - DNA, 363 bp, synthetic construct
  source 1..363: mol_type = other DNA
caggtgcagctggtggagtctgggggaggcgtggtccagcctgggaggtccctgagactctcctgtgcagcgtctggattcaccttcagttactttggcatgcactgggtccgccaggctccaggcaaggggctggagtgggtggcagttatatggtatgatgcaagtaataaatactatgcagacgccgtgaagggccgcttcaccatctccagagacaattccaagaacacgctgtatctgcaaatgaacagcctgagagccgaggacacggctgtgtattactgtgcgcgagatgggacgatttttggagtgctcttgggggactactggggccagggaaccctggtcaccgtctcctca

SEQ ID NO: 1743 - DNA, 363 bp, synthetic construct
  source 1..363: mol_type = other DNA
caggtgcagctggtggagtctgggggaggcgtggtccagcctgggaggtccctgagactctcctgtgcagcgtctggattcaccttcagttactttggcatgcactgggtccgccaggctccaggcaaggggctggagtgggtggcagttatatggtatgatgcaagtaataaatactatgcagactccgtgaagggccgcttcaccatctccagagacaattccaagaacacgctgtatctgcaaatgaacagcctgagagccgaggacacggctgtgtattactgtgcgcgagatgggacgatttttggagtgctcttgggggactactggggccagggaaccctggtcaccgtctcctca

SEQ ID NO: 1744 - DNA, 363 bp, synthetic construct
  source 1..363: mol_type = other DNA
caggtgcagctggtggagtctgggggaggcgtggtccagcctgggaggtccctgagactctcctgtgcagcgtctggattcaccttcagttactttggcatgcactgggtccgccaggctccaggcaaggggctggagtgggtggcagttatatggtatgatggaagtaataaatactatgcagacgccgtgaagggccgcttcaccatctccagagacaattccaagaacacgctgtatctgcaaatgaacagcctgagagccgaggacacggctgtgtattactgtgcgcgagatgggacgatttttggagtgctcttgggggactactggggccagggaaccctggtcaccgtctcctca

SEQ ID NO: 1745 - DNA, 363 bp, synthetic construct; identical to SEQ ID NO: 1742
  source 1..363: mol_type = other DNA

SEQ ID NO: 1746 - DNA, 363 bp, synthetic construct; identical to SEQ ID NO: 1742
  source 1..363: mol_type = other DNA

SEQ ID NO: 1747 - DNA, 363 bp, synthetic construct
  source 1..363: mol_type = other DNA
caggtgcagctggtggagtctgggggaggcgtggtccagcctgggaggtccctgagactctcctgtgcagcgtctggattcaccttcagttactttggcatgcactgggtccgccaggctccaggcaaggggctggagtgggtggcagttatatggtatgatgcaagtaataaatactatgcagacgccgtgaagggccgcttcaccatctccagagacaattccaagaacacgctgtatctgcaaatgaacagcctgagagccgaggacacggctgtgtattactgtgcgcgagataggacgatttttggagtgctcttgggggactactggggccagggaaccctggtcaccgtctcctca

SEQ ID NO: 1748 - DNA, 363 bp, synthetic construct
  source 1..363: mol_type = other DNA
caggtgcagctggtggagtctgggggaggcgtggtccagcctgggaggtccctgagactctcctgtgcagcgtctggattcactttcagtaactttggcatgcactgggtccgccaggctccaggcaaggggctggagtgggtggcagttatatggtatgatgcaagtaatgaaaactatgcagacgccgtgaagggccgattcaccatctccagagacaattccaagaatacgctgtatctgcaaatgaacagcctgagagtcgcggacacggctgtgtattattgtgcgcgagatgggacgatctttggagtggtcttgggggactactggggccagggaaccctggtcaccgtctcctca

SEQ ID NO: 1749 - DNA, 363 bp, synthetic construct; identical to SEQ ID NO: 1748
  source 1..363: mol_type = other DNA

SEQ ID NO: 1750 - DNA, 363 bp, synthetic construct; identical to SEQ ID NO: 1748
  source 1..363: mol_type = other DNA

SEQ ID NO: 1751 - DNA, 363 bp, synthetic construct
  source 1..363: mol_type = other DNA
caggtgcagctggtggagtctgggggaggcgtggtccagcctgggaggtccctgagactctcctgtgcagcgtctggattcactttcagtaactttggcatgcactgggtccgccaggctccaggcaaggggctggagtgggtggcagttatatggtatgatgcaagtaatgaaaactatgcagactccgtgaagggccgattcaccatctccagagacaattccaagaatacgctgtatctgcacatgaacagcctgagagtcgcggacacggctgtgtattattgtgcgcgagatgggacgatctttggagtggtcttgggggactactggggccagggaaccctggtcaccgtctcctca

SEQ ID NO: 1752 - DNA, 363 bp, synthetic construct
  source 1..363: mol_type = other DNA
caggtgcagctggtggagtctgggggaggcgtggtccagcctgggaggtccctgagactctcctgtgcagcgtctggattcactttcagtaactttggcatgcactgggtccgccaggctccaggcaaggggctggagtgggtggcagttatatggtatgatggaagtaatgaaaactatgcagacgccgtgaagggccgattcaccatctccagagacaattccaagaatacgctgtatctgcacatgaacagcctgagagtcgcggacacggctgtgtattattgtgcgcgagatgggacgatctttggagtggtcttgggggactactggggccagggaaccctggtcaccgtctcctca

SEQ ID NO: 1753 - DNA, 363 bp, synthetic construct
  source 1..363: mol_type = other DNA
caggtgcagctggtggagtctgggggaggcgtggtccagcctgggaggtccctgagactctcctgtgcagcgtctggattcactttcagtaactttggcatgcactgggtccgccaggctccaggcaaggggctggagtgggtggcagttatatggtatgatgcaagtaatgaaaactatgcagacgccgtgaagggccgattcaccatctccagagacaattccaagaatacgctgtatctgcaaatgaacagcctgagagtcgaggacacggctgtgtattattgtgcgcgagataggacgatctttggagtggtcttgggggactactggggccagggaaccctggtcaccgtctcctca

SEQ ID NO: 1754 - DNA, 363 bp, synthetic construct
  source 1..363: mol_type = other DNA
caggtgcagctggtggagtctgggggaggcgtggtccagcctgggaggtccctgagactctcctgtgcagcgtctggattcactttcagtaactttggcatgcactgggtccgccaggctccaggcaaggggctggagtgggtggcagttatatggtatgatgcaagtaatgaaaactatgcagacgccgtgaagggccgattcaccatctccagagacaattccaagaatacgctgtatctgcaaatgaacagcctgagagtcgaggacacggctgtgtattattgtgcgcgagatgggacgatctttggagtggtcttgggggactactggggccagggaaccctggtcaccgtctcctca

SEQ ID NO: 1755 - DNA, 363 bp, synthetic construct
  source 1..363: mol_type = other DNA
caggtgcagctggtggagtctgggggaggcgtggtccagcctgggaggtccctgagactctcctgtgcagcgtctggattcactttcagtaactttggcatgcactgggtccgccaggccccaggcaaggggctggagtgggtggcagttatatggtatgatggaagtaatgaaaactatgcagactccgtgaagggccgattcaccatctccagagacaattccaagaacacgctgtatctgcacatgaacagcctgagagccgcggacacggctgtgtattactgtgcgagagatgggacgatctttggagtggtcttgggggactactggggccagggaaccctggtcaccgtctcctca

SEQ ID NO: 1756 - DNA, 363 bp, synthetic construct
  source 1..363: mol_type = other DNA
caggtgcagctggtggagtctgggggaggcgtggtccagcctgggaggtccctgagactctcctgtgcagcgtctggattcactttcagtaactttggcatgcactgggtccgccaggccccaggcaaggggctggagtgggtggcagttatatggtatgatgcaagtaatgaaaactatgcagacgccgtgaagggccgattcaccatctccagagacaattccaagaacacgctgtatctgcaaatgaacagcctgagagccgcggacacggctgtgtattactgtgcgagagatgggacgatctttggagtggtcttgggggactactggggccagggaaccctggtcaccgtctcctca

SEQ ID NO: 1757 - DNA, 363 bp, synthetic construct
  source 1..363: mol_type = other DNA
caggtgcagctggtggagtctgggggaggcgtggtccagcctgggaggtccctgagactctcctgtgcagcgtctggattcactttcagtaactttggcatgcactgggtccgccaggccccaggcaaggggctggagtgggtggcagttatatggtatgatgcaagtaatgaaaactatgcagacgccgtgaagggccgattcaccatctccagagacaattccaagaacacgctgtatctgcacatgaacagcctgagagccgcggacacggctgtgtattactgtgcgagagatgggacgatctttggagtggtcttgggggactactggggccagggaaccctggtcaccgtctcctca

SEQ ID NO: 1758 - DNA, 363 bp, synthetic construct; identical to SEQ ID NO: 1756
  source 1..363: mol_type = other DNA

SEQ ID NO: 1759 - DNA, 363 bp, synthetic construct; identical to SEQ ID NO: 1756
  source 1..363: mol_type = other DNA

SEQ ID NO: 1760 - DNA, 363 bp, synthetic construct; identical to SEQ ID NO: 1757
  source 1..363: mol_type = other DNA

SEQ ID NO: 1761 - DNA, 363 bp, synthetic construct; identical to SEQ ID NO: 1757
  source 1..363: mol_type = other DNA

SEQ ID NO: 1762 - DNA, 363 bp, synthetic construct; identical to SEQ ID NO: 1756
  source 1..363: mol_type = other DNA

SEQ ID NO: 1763 - DNA, 363 bp, synthetic construct
  source 1..363: mol_type = other DNA
caggtgcagctggtggagtctgggggaggcgtggtccagcctgggaggtccctgagactctcctgtgcagcgtctggattcactttcagtaactttggcatgcactgggtccgccaggccccaggcaaggggctggagtgggtggcagttatatggtatgatggaagtaatgaaaactatgcagacgccgtgaagggccgattcaccatctccagagacaattccaagaacacgctgtatctgcaaatgaacagcctgagagccgcggacacggctgtgtattactgtgcgagagatgggacgatctttggagtggtcttgggggactactggggccagggaaccctggtcaccgtctcctca

SEQ ID NO: 1764 - DNA, 363 bp, synthetic construct
  source 1..363: mol_type = other DNA
caggtgcagctggtggagtctgggggaggcgtggtccagcctgggaggtccctgagactctcctgtgcagcgtctggattcactttcagtaactttggcatgcactgggtccgccaggccccaggcaaggggctggagtgggtggcagttatatggtatgatgcaagtaatgaaaactatgcagactccgtgaagggccgattcaccatctccagagacaattccaagaacacgctgtatctgcaaatgaacagcctgagagccgcggacacggctgtgtattactgtgcgagagatgggacgatctttggagtggtcttgggggactactggggccagggaaccctggtcaccgtctcctca

SEQ ID NO: 1765 - DNA, 363 bp, synthetic construct
  source 1..363: mol_type = other DNA
caggtgcagctggtggagtctgggggaggcgtggtccagcctgggaggtccctgagactctcctgtgcagcgtctggattcactttcagtaactttggcatgcactgggtccgccaggccccaggcaaggggctggagtgggtggcagttatatggtatgatgcaagtaatgaaaactatgcagacgccgtgaagggccgattcaccatctccagagacaattccaagaacacgctgtatctgcaaatgaacagcctgagagccgaggacacggctgtgtattactgtgcgagagataggacgatctttggagtggtcttgggggactactggggccagggaaccctggtcaccgtctcctca

SEQ ID NO: 1766 - DNA, 363 bp, synthetic construct
  source 1..363: mol_type = other DNA
caggtgcagctggtggagtctgggggaggcgtggtccagcctgggaggtccctgagactctcctgtgcagcgtctggattcactttcagtaactttggcatgcactgggtccgccaggccccaggcaaggggctggagtgggtggcagttatatggtatgatgcaagtaatgaaaactatgcagacgccgtgaagggccgattcaccatctccagagacaattccaagaacacgctgtatctgcaaatgaacagcctgagagccgaggacacggctgtgtattactgtgcgagagatgggacgatctttggagtggtcttgggggactactggggccagggaaccctggtcaccgtctcctca

SEQ ID NO: 1767 - DNA, 360 bp, synthetic construct
  source 1..360: mol_type = other DNA
caggtgcaactggtggagtctgggggaggcgtggtccagcctgggaggtccctgagactctcctgtgcagcgtctggattcaccttcagtagctatggcatgcactgggtccgccaggctccaggcaaggggctggagtgggtggcagttatatggtatgatgcaagtaataaatactatgcagacgccgtgaagggccgattcaccatctccagggacaattccaagaacacgctgtatctgcaaatgaacagcctgagagccgaggacacggctgtgtattactgtgcgagagataggacgatttttggagtggttcttgactactggggccagggaaccctggtcaccgtctcctca

SEQ ID NO: 1768 - DNA, 360 bp, synthetic construct
  source 1..360: mol_type = other DNA
caggtgcaactggtggagtctgggggaggcgtggtccagcctgggaggtccctgagactctcctgtgcagcgtctggattcaccttcagtagctatggcatgcactgggtccgccaggctccaggcaaggggctggagtgggtggcagttatatggtatgatgcaagtaataaatactatgcagacgccgtgaagggccgattcaccatctccagcgacaattccaagaacacgctgtatctgcaaatgaacagcctgagagccgaggacacggctgtgtattactgtgcgagagataggacgatttttggagtggttcttgactactggggccagggaaccctggtcaccgtctcctca

SEQ ID NO: 1769 - DNA, 360 bp, synthetic construct; identical to SEQ ID NO: 1767
  source 1..360: mol_type = other DNA

SEQ ID NO: 1770 - DNA, 360 bp, synthetic construct; identical to SEQ ID NO: 1767
  source 1..360: mol_type = other DNA

SEQ ID NO: 1771 - DNA, 360 bp, synthetic construct; identical to SEQ ID NO: 1768
  source 1..360: mol_type = other DNA

SEQ ID NO: 1772 - DNA, 360 bp, synthetic construct; identical to SEQ ID NO: 1768
  source 1..360: mol_type = other DNA

SEQ ID NO: 1773 - DNA, 360 bp, synthetic construct; identical to SEQ ID NO: 1767
  source 1..360: mol_type = other DNA

SEQ ID NO: 1774 - DNA, 360 bp, synthetic construct
  source 1..360: mol_type = other DNA
caggtgcaactggtggagtctgggggaggcgtggtccagcctgggaggtccctgagactctcctgtgcagcgtctggattcaccttcagtagctatggcatgcactgggtccgccaggctccaggcaaggggctggagtgggtggcagttatatggtatgatgcaagtaataaatactatgcagactccgtgaagggccgattcaccatctccagggacaattccaagaacacgctgtatctgcaaatgaacagcctgagagccgaggacacggctgtgtattactgtgcgagagataggacgatttttggagtggttcttgactactggggccagggaaccctggtcaccgtctcctca

SEQ ID NO: 1775 - DNA, 360 bp, synthetic construct
  source 1..360: mol_type = other DNA
caggtgcaactggtggagtctgggggaggcgtggtccagcctgggaggtccctgagactctcctgtgcagcgtctggattcaccttcagtagctatggcatgcactgggtccgccaggctccaggcaaggggctggagtgggtggcagttatatggtatgatggaagtaataaatactatgcagacgccgtgaagggccgattcaccatctccagggacaattccaagaacacgctgtatctgcaaatgaacagcctgagagccgaggacacggctgtgtattactgtgcgagagataggacgatttttggagtggttcttgactactggggccagggaaccctggtcaccgtctcctca

SEQ ID NO: 1776 - DNA, 363 bp, synthetic construct; identical to SEQ ID NO: 1742
  source 1..363: mol_type = other DNA

SEQ ID NO: 1777 - DNA, 363 bp, synthetic construct; identical to SEQ ID NO: 1747
  source 1..363: mol_type = other DNA

SEQ ID NO: 1778 - DNA, 363 bp, synthetic construct; identical to SEQ ID NO: 1742
  source 1..363: mol_type = other DNA

SEQ ID NO: 1779 - DNA, 363 bp, synthetic construct; identical to SEQ ID NO: 1747
  source 1..363: mol_type = other DNA

SEQ ID NO: 1780 - DNA, 363 bp, synthetic construct; identical to SEQ ID NO: 1730
  source 1..363: mol_type = other DNA

SEQ ID NO: 1781 - DNA, 363 bp, synthetic construct; identical to SEQ ID NO: 1743
  source 1..363: mol_type = other DNA

SEQ ID NO: 1782 - DNA, 363 bp, synthetic construct; identical to SEQ ID NO: 1744
  source 1..363: mol_type = other DNA

SEQ ID NO: 1783 - DNA, 360 bp, synthetic construct
  source 1..360: mol_type = other DNA
caggtgcagctggtggagtctgggggaggcgtggtccagcctgggaggtccctgagactctcctgtgcagcgtctggattctccttcagtagctatggcatgcactgggtccgccagcctccaggcaaggggctggagtgggtggcagctatatggtatgatgcaaataataaatactatgcagacgccgtgaagggccgattcaccatctccagagacagttccaagaacacgctgtatctgcaaatgaacagcctgagagccgaggacacggctgtgtattactgtgcgagagatcggacgatttttggagtggtccttgagtactggggccagggaaccctggtcaccgtctcctca

SEQ ID NO: 1784 - DNA, 360 bp, synthetic construct; identical to SEQ ID NO: 1783
  source 1..360: mol_type = other DNA

SEQ ID NO: 1785 - DNA, 360 bp, synthetic construct
  source 1..360: mol_type = other DNA
caggtgcagctggtggagtctgggggaggcgtggtccagcctgggaggtccctgagactctcctgtgcagcgtctggattctccttcagtagctatggcatgcactgggtccgccagcctccaggcaaggggctggagtgggtggcagctatatggtatgatgcaaataataaatactatgcagacgccgtgaagggccgattcaccatctccagagacagttccaagaacacgctgtatctgcaaatgaacagcctgagagccgaggacacggctgtgtattactgtgcgagagatcggacgatttttggagtggtccttgagtacctcggccagggaaccctggtcaccgtctcctca

SEQ ID NO: 1786 - DNA, 360 bp, synthetic construct; identical to SEQ ID NO: 1783
  source 1..360: mol_type = other DNA

SEQ ID NO: 1787 - DNA, 360 bp, synthetic construct; identical to SEQ ID NO: 1785
  source 1..360: mol_type = other DNA

SEQ ID NO: 1788 - DNA, 360 bp, synthetic construct; identical to SEQ ID NO: 1785
  source 1..360: mol_type = other DNA

SEQ ID NO: 1789 - DNA, 360 bp, synthetic construct; identical to SEQ ID NO: 1783
  source 1..360: mol_type = other DNA

SEQ ID NO: 1790 - DNA, 360 bp, synthetic construct
  source 1..360: mol_type = other DNA
caggtgcagctggtggagtctgggggaggcgtggtccagcctgggaggtccctgagactctcctgtgcagcgtctggattctccttcagtagctatggcatgcactgggtccgccagcctccaggcaaggggctggagtgggtggcagctatatggtatgatggaaataataaatactatgcagacgccgtgaagggccgattcaccatctccagagacagttccaagaacacgctgtatctgcaaatgaacagcctgagagccgaggacacggctgtgtattactgtgcgagagatcggacgatttttggagtggtccttgagtactggggccagggaaccctggtcaccgtctcctca

SEQ ID NO: 1791 - DNA, 360 bp, synthetic construct
  source 1..360: mol_type = other DNA
caggtgcagctggtggagtctgggggaggcgtggtccagcctgggaggtccctgagactctcctgtgcagcgtctggattctccttcagtagctatggcatgcactgggtccgccagcctccaggcaaggggctggagtgggtggcagctatatggtatgatgcaaataataaatactatgcagactccgtgaagggccgattcaccatctccagagacagttccaagaacacgctgtatctgcaaatgaacagcctgagagccgaggacacggctgtgtattactgtgcgagagatcggacgatttttggagtggtccttgagtactggggccagggaaccctggtcaccgtctcctca

SEQ ID NO: 1792 - DNA, 360 bp, synthetic construct; identical to SEQ ID NO: 1783
  source 1..360: mol_type = other DNA

SEQ ID NO: 1793 - DNA, 360 bp, synthetic construct; identical to SEQ ID NO: 1785
  source 1..360: mol_type = other DNA

SEQ ID NO: 1794 - DNA, 360 bp, synthetic construct
  source 1..360: mol_type = other DNA
caggtgcagctggtggagtctgggggaggcgtggtccagcctgggaggtccctgagactctcctgtgcagcgtctggattcagtttcagtagctatggcatgcactgggtccgccaggctccaggcaagggactggagtgggtggcagttatatggtatgatgcaagtaataaatactatgaagacgccgtgaagggccgattcaccatctccagagacaattccaagaacacgctgtttctgcaagtgaacagcctgagagccgaggacacggctgtgtattactgtgcgagagggattacgatttttggtcatgggtttgaatattggggccagggaaccctggtcaccgtctcctca

SEQ ID NO: 1795 - DNA, 360 bp, synthetic construct
  source 1..360: mol_type = other DNA
caggtgcagctggtggagtctgggggaggcgtggtccagcctgggaggtccctgagactctcctgtgcagcgtctggattcagtttcagtagctatggcatgcactgggtccgccaggctccaggcaagggactggagtgggtggcagttatatggtatgatggaagtaataaatactatgaagactccgtgaagggccgattcaccatctccagagacaattccaagaacacgctgtttctgcaagtgaacagcctgagagccgaggacacggctgtgtattactgtgcgagagggattacgatttttggtcatgggtttgaatattggggccagggaaccctggtcaccgtctcctca

SEQ ID NO: 1796 - DNA, 360 bp, synthetic construct
  source 1..360: mol_type = other DNA
caggtgcagctggtggagtctgggggaggcgtggtccagcctgggaggtccctgagactctcctgtgcagcgtctggattcagtttcagtagctatggcatgcactgggtccgccaggctccaggcaagggactggagtgggtggcagttatatggtatgatggaagtaataaatactatgaagacgccgtgaagggccgattcaccatctccagagacaattccaagaacacgctgtttctgcaagtgaacagcctgagagccgaggacacggctgtgtattactgtgcgagagggattacgatttttggtcatgggtttgaatattggggccagggaaccctggtcaccgtctcctca

SEQ ID NO: 1797 - DNA, 360 bp, synthetic construct
  source 1..360: mol_type = other DNA
caggtgcagctggtggagtctgggggaggcgtggtccagcctgggaggtccctgagactctcctgtgcagcgtctggattcagtttcagtagctatggcatgcactgggtccgccaggctccaggcaagggactggagtgggtggcagttatatggtatgatgcaagtaataaatactatgaagactccgtgaagggccgattcaccatctccagagacaattccaagaacacgctgtttctgcaagtgaacagcctgagagccgaggacacggctgtgtattactgtgcgagagggattacgatttttggtcatgggtttgaatattggggccagggaaccctggtcaccgtctcctca

SEQ ID NO: 1798 - DNA, 360 bp, synthetic construct
  source 1..360: mol_type = other DNA
caggtgcagctggtggagtctgggggaggcgtggtccagcctgggaggtccctgagactctcctgtgcagcatctggattcaccttcagtaactatggcatgcactgggtccgccaggctccaggcgaggggctggagtgggtggcagctatatggtttgatgcaagtgataaatactatgcagacgccgtgaagggccgattcaccatctccagagacaactccaagaacacgctgtatctgcaaatgaacagcctgagagccgaggacacggctgtgtattactgtgcgagagatcaggcgatttttggagtggtccccgactactggggccagggaaccctggtcaccgtctcctca

SEQ ID NO: 1799 - DNA, 360 bp, synthetic construct
  source 1..360: mol_type = other DNA
caggtgcagctggtggagtctgggggaggcgtggtccagcctgggaggtccctgagactctcctgtgcagcatctggattcaccttcagtaactatggcatgcactgggtccgccaggctccaggcgaggggctggagtgggtggcagctatatggtttgatgcaagtgataaatactatgcagactccgtgaagggccgattcaccatctccagagacaactccaagaacacgctgtatctgcaaatgaacagcctgagagccgaggacacggctgtgtattactgtgcgagagatcaggcgatttttggagtggtccccgactactggggccagggaaccctggtcaccgtctcctca

SEQ ID NO: 1800 - DNA, 360 bp, synthetic construct
  source 1..360: mol_type = other DNA
caggtgcagctggtggagtctgggggaggcgtggtccagcctgggaggtccctgagactctcctgtgcagcatctggattcaccttcagtaactatggcatgcactgggtccgccaggctccaggcgaggggctggagtgggtggcagctatatggtttgatggaagtgataaatactatgcagacgccgtgaagggccgattcaccatctccagagacaactccaagaacacgctgtatctgcaaatgaacagcctgagagccgaggacacggctgtgtattactgtgcgagagatcaggcgatttttggagtggtccccgactactggggccagggaaccctggtcaccgtctcctca

SEQ ID NO: 1801 - DNA, 360 bp, synthetic construct; identical to SEQ ID NO: 1798
  source 1..360: mol_type = other DNA

SEQ ID NO: 1802 - DNA, 360 bp, synthetic construct
  source 1..360: mol_type = other DNA
caggtgcagctggtggagtctgggggaggcgtggtccagcctgggaggtccctgagactctcctgtgcagcatctggattcaccttcagtaactatggcatgcactgggtccgccaggctccaggcaaggggctggagtgggtggcagctatatggtttgatgcaagtgataaatactatgcagacgccgtgaagggccgattcaccatctccagagacaactccaagaacacgctgtatctgcaaatgaacagcctgagagccgaggacacggctgtgtattactgtgcgagagatcaggcgatttttggagtggtccccgactactggggccagggaaccctggtcaccgtctcctca

SEQ ID NO: 1803 - DNA, 360 bp, synthetic construct; identical to SEQ ID NO: 1802
  source 1..360: mol_type = other DNA

SEQ ID NO: 1804 - DNA, 360 bp, synthetic construct; identical to SEQ ID NO: 1798
  source 1..360: mol_type = other DNA

SEQ ID NO: 1805 - DNA, 360 bp, synthetic construct; identical to SEQ ID NO: 1802
  source 1..360: mol_type = other DNA

SEQ ID NO: 1806 - DNA, 378 bp, synthetic construct
  source 1..378: mol_type = other DNA
caggtgcagttgcaggagtcgggcccaggactggtgaagccttcagagaccctgtccctcacctgcactgtctctggtgactccatcagcagtggtggttactactggagctggatccgccagcccccagggaagggcctggagtggattgggtacatctattacagtgggagcacctactacaacccgtccctcaagagtcgagttaccatatcagtagacacgtctaagaaccagttctccctgaagctgagctctgtgactgccgcggacacggccgtgtattactgtgcgagagatcgtattacgatttttggagtggttatggggggcggtatggacgtctggggccaagggaccacggtcaccgtctcctca

SEQ ID NO: 1807 - DNA, 378 bp, synthetic construct; identical to SEQ ID NO: 1806
  source 1..378: mol_type = other DNA

SEQ ID NO: 1808 - DNA, 378 bp, synthetic construct
  source 1..378: mol_type = other DNA
caggtgcagttgcaggagtcgggcccaggactggtgaagccttcacagaccctgtccctcacctgcactgtctctggtgactccatcagcagtggtggttactactggagctggatccgccagcccccagggaagggcctggagtggattgggtacatctattacagtgggagcacctactacaacccgtccctcaagagtcgagttaccatatcagtagacacgtctaagaaccagttctccctgaagctgagctctgtgactgccgcggacacggccgtgtattactgtgcgagagatcgtattacgatttttggagtggttatggggggcggtatggacgtctggggccaagggaccacggtcaccgtctcctca

SEQ ID NO: 1809 - DNA, 378 bp, synthetic construct
  source 1..378: mol_type = other DNA
caggtgcagttgcaggagtcgggcccaggactggtgaagccttcagagaccctgtccctcacctgcactgtctctggtgactccatcagcagtggtggttactactggagctggatccgccagcacccagggaagggcctggagtggattgggtacatctattacagtgggagcacctactacaacccgtccctcaagagtcgagttaccatatcagtagacacgtctaagaaccagttctccctgaagctgagctctgtgactgccgcggacacggccgtgtattactgtgcgagagatcgtattacgatttttggagtggttatggggggcggtatggacgtctggggccaagggaccacggtcaccgtctcctca

SEQ ID NO: 1810 - DNA, 378 bp, synthetic construct; identical to SEQ ID NO: 1736
  source 1..378: mol_type = other DNA

SEQ ID NO: 1811 - DNA, 378 bp, synthetic construct; identical to SEQ ID NO: 1809
  source 1..378: mol_type = other DNA

SEQ ID NO: 1812 - DNA, 378 bp, synthetic construct; identical to SEQ ID NO: 1808
  source 1..378: mol_type = other DNA

SEQ ID NO: 1813 - DNA, 369 bp, synthetic construct
  source 1..369: mol_type = other DNA
caggtgcagctggtgcagtctggggctgaggtgaagaagcctggggcctcagtgaaggtctcctgcaaggcttctggatacaccttcaccggctactatatccactgggtgcgacaggcccctggacaagggcttgagtggatggggtggatcaaccctgaaagtggtggcacagactattcacagaggtttcagggcagggtcaccatgaccagggacacgtccatcagcacagcctacatggaactgaacaggctgagatctgacgacacggccgtgtattactgtgcgagagaggccacgatttttggaatggttattgtaccgtttgactactggggccagggaaccctggtcaccgtctcctca

SEQ ID NO: 1814 - DNA, 369 bp, synthetic construct
  source 1..369: mol_type = other DNA
caggtgccgctggtgcagtctggggctgaggtgaagaagcctggggcctcagtgaaggtctcctgcaaggcttctggatacaccttcaccggctactatatccactgggtgcgacaggcccctggacaagggcttgagtggatggggtggatcaaccctgaaagtggtggcacagactattcacagaggtttcagggcaggttcaccatgaccagggacacgtccatcagcacagcctacatggaactgaacaggctgagatctgacgacacggccgtgtattactgtgcgagagaggccacgatttttggaatggttattgtaccgtttgactactggggccagggaaccctggtcaccgtctcctca

SEQ ID NO: 1815 - DNA, 369 bp, synthetic construct
  source 1..369: mol_type = other DNA
caggtgcagctggtgcagtctggggctgaggtgaagaagcctggggcctcagtgaaggtctcctgcaaggcttctggatacaccttcaccggctactatatccactgggtgcgacaggcccctggacaagggcttgagtggatggggtggatcaaccctgacgctggtggcacagactattcacagaggtttcagggcagggtcaccatgaccagggacacgtccatcagcacagcctacatggaactgaacaggctgagatctgacgacacggccgtgtattactgtgcgagagaggccacgatttttggaatggttattgtaccgtttgactactggggccagggaaccctggtcaccgtctcctca

SEQ ID NO: 1816 - DNA, 369 bp, synthetic construct
  source 1..369: mol_type = other DNA
caggtgccgctggtgcagtctggggctgaggtgaagaagcctggggcctcagtgaaggtctcctgcaaggcttctggatacaccttcaccggctactatatccactgggtgcgacaggcccctggacaagggcttgagtggatggggtggatcaaccctgacgctggtggcacagactattcacagaggtttcagggcaggttcaccatgaccagggacacgtccatcagcacagcctacatggaactgaacaggctgagatctgacgacacggccgtgtattactgtgcgagagaggccacgatttttggaatggttattgtaccgtttgactactggggccagggaaccctggtcaccgtctcctca

SEQ ID NO: 1817 - DNA, 369 bp, synthetic construct
  source 1..369: mol_type = other DNA
caggtgcagctggtgcagtctggggctgaggtgaagaagcctggggcctcagtgaaggtctcctgcaaggcttctggatacaccttcaccggctactatatccactgggtgcgacaggcccctggacaagggcttgagtggatggggtggatcaaccctgacagtggtggcacagactattcacagaggtttcagggcagggtcaccatgaccagggacacgtccatcagcacagcctacatggaactgaacaggctgagatctgacgacacggccgtgtattactgtgcgagagaggccacgatttttggaatggttattgtaccgtttgactactggggccagggaaccctggtcaccgtctcctca

SEQ ID NO: 1818 - DNA, 369 bp, synthetic construct
  source 1..369: mol_type = other DNA
caggtgcagctggtgcagtctggggctgaggtgaagaagcctggggcctcagtgaaggtctcctgcaaggcttctggatacaccttcaccggctactatatccactgggtgcgacaggcccctggacaagggcttgagtggatggggtggatcaaccctgacagtggtggcacagactattcacagaggtttcagggcaggttcaccatgaccagggacacgtccatcagcacagcctacatggaactgaacaggctgagatctgacgacacggccgtgtattactgtgcgagagaggccacgatttttggaatggttattgtaccgtttgactactggggccagggaaccctggtcaccgtctcctca

SEQ ID NO: 1819 - DNA, 369 bp, synthetic construct
  source 1..369: mol_type = other DNA
caggtgccgctggtgcagtctggggctgaggtgaagaagcctggggcctcagtgaaggtctcctgcaaggcttctggatacaccttcaccggctactatatccactgggtgcgacaggcccctggacaagggcttgagtggatggggtggatcaaccctgacagtggtggcacagactattcacagaggtttcagggcagggtcaccatgaccagggacacgtccatcagcacagcctacatggaactgaacaggctgagatctgacgacacggccgtgtattactgtgcgagagaggccacgatttttggaatggttattgtaccgtttgactactggggccagggaaccctggtcaccgtctcctca

SEQ ID NO: 1820 - DNA, 369 bp, synthetic construct
  source 1..369: mol_type = other DNA
caggtgcagctggtgcagtctggggctgaggtgaagaagcctggggcctcagtgaaggtctcctgcaaggcttctggatacaccttcaccggctactatatccactgggtgcgacaggcccctggacaagggcttgagtggatggggtggatcaaccctgacgctggtggcacagactattcacagaggtttcagggcaggttcaccatgaccagggacacgtccatcagcacagcctacatggaactgaacaggctgagatctgacgacacggccgtgtattactgtgcgagagaggccacgatttttggaatggttattgtaccgtttgactactggggccagggaaccctggtcaccgtctcctca

SEQ ID NO: 1821 - DNA, 369 bp, synthetic construct
  source 1..369: mol_type = other DNA
caggtgccgctggtgcagtctggggctgaggtgaagaagcctggggcctcagtgaaggtctcctgcaaggcttctggatacaccttcaccggctactatatccactgggtgcgacaggcccctggacaagggcttgagtggatggggtggatcaaccctgacgctggtggcacagactattcacagaggtttcagggcagggtcaccatgaccagggacacgtccatcagcacagcctacatggaactgaacaggctgagatctgacgacacggccgtgtattactgtgcgagagaggccacgatttttggaatggttattgtaccgtttgactactggggccagggaaccctggtcaccgtctcctca

SEQ ID NO: 1822 - DNA, 369 bp, synthetic construct
  source 1..369: mol_type = other DNA
caggtgcagctggtgcagtctggggctgaggtgaagaagcctggggcctcagtgaaggtctcctgcaaggcttctggatacaccttcaccggctactatatccactgggtgcgacaggcccctggacaagggcttgagtggatggggtggatcaaccctgacgctggtggcacagactattcacagaggtttcagggcagggtcaccatgaccagggacacgtccatcagcacagcctacatggaactgaacagcctgagatctgacgacacggccgtgtattactgtgcgagagaggccacgatttttggaatggttattgtaccgtttgactactggggccagggaaccctggtcaccgtctcctca

SEQ ID NO: 1823 - DNA, 369 bp, synthetic construct
  source 1..369: mol_type = other DNA
caggtgcagctggtgcagtctggggctgaggtgaagaagcctggggcctcagtgaaggtctcctgcaaggcttctggatacaccttcaccggctactatatccactgggtgcgacaggcccctggacaagggcttgagtggatggggtggatcaaccctgaaagtggtggcacagactattcacagaggtttcagggcagggtcaccatgaccagggacacgtccatcagcacagcctacatggaactgaacagcctgagatctgacgacacggccgtgtattactgtgcgagagaggccacgatttttggaatggttattgtaccgtttgactactggggccagggaaccctggtcaccgtctcctca

SEQ ID NO: 1824 - DNA, 369 bp, synthetic construct
  source 1..369: mol_type = other DNA
caggtgccgctggtacagtctggggctgaggtgaagaagcctggggcctcagtgaaggtctcctgcaaggcttctggatacaccttcaccggctactatatacactgggtgcgtcaggcccctggacaagggcttgtgtggatggggtggatcagccctaacagtggtgaaacaagctatgcacagaagtttcaggacagggtcaccatgaccagggacacgtccatcagcacagcctatatggagctgagcagactgagatctgacgacacggccgtgtatttctgtgcgagagaggccacgatttttggaatgcttattgtaccatttgactactggggccagggaaccctggtcaccgtctcctca

SEQ ID NO: 1825 - DNA, 369 bp, synthetic construct
  source 1..369: mol_type = other DNA
caggtgccgctggtacagtctggggctgaggtgaagaagcctggggcctcagtgaaggtctcctgcaaggcttctggatacaccttcaccggctactatatacactgggtgcgtcaggcccctggacaagggcttgtgtggatggggtggatcagccctaacagtggtgacacaagctatgcacagaagtttcaggacagggtcaccatgaccagggacacgtccatcagcacagcctatatggagctgagcagactgagatctgacgacacggccgtgtatttctgtgcgagagaggccacgatttttggaatgcttattgtaccatttgactactggggccagggaaccctggtcaccgtctcctca

SEQ ID NO: 1826 - DNA, 369 bp, synthetic construct; identical to SEQ ID NO: 1824
  source 1..369: mol_type = other DNA

SEQ ID NO: 1827 - DNA, 369 bp, synthetic construct
  source 1..369: mol_type = other DNA
caggtgccgctggtacagtctggggctgaggtgaagaagcctggggcctcagtgaaggtctcctgcaaggcttctggatacaccttcaccggctactatatacactgggtgcgtcaggcccctggacaagggcttgtgtggatggggtggatcagccctaacagtggtgaaacaagctatgcacagaagtttcaggacagggtcaccatgaccagggacacgtccatcagcacagcctatatggagctgagcagactgagatctgacgacacggccgtgtatttctgtacgagagaggccacgatttttggaatgcttattgtaccatttgactactggggccagggaaccctggtcaccgtctcctca

SEQ ID NO: 1828 - DNA, 369 bp, synthetic construct; identical to SEQ ID NO: 1734
  source 1..369: mol_type = other DNA

SEQ ID NO: 1829 - DNA, 369 bp, synthetic construct; identical to SEQ ID NO: 1827
  source 1..369: mol_type = other DNA

SEQ ID NO: 1830 - DNA, 369 bp, synthetic construct; identical to SEQ ID NO: 1825
  source 1..369: mol_type = other DNA

SEQ ID NO: 1831 - DNA, 369 bp, synthetic construct
  source 1..369: mol_type = other DNA
caggtgcagctggtacagtctggggctgaggtgaagaagcctggggcctcagtgaaggtctcctgcaaggcttctggatacaccttcaccggctactatatacactgggtgcgtcaggcccctggacaagggcttgagtggatggggtggatcagccctaacagtggtgaaacaagctatgcacagaagtttcaggacagggtcaccatgaccagggacacgtccatcagcacagcctatatggagctgagcagcctgagatctgacgacacggccgtgtatttctgtgcgagagaggccacgatttttggaatgcttattgtaccatttgactactggggccagggaaccctggtcaccgtctcctca

SEQ ID NO: 1832 - DNA, 369 bp, synthetic construct
  source 1..369: mol_type = other DNA
caggtgcagctggtacagtctggggctgaggtgaagaagcctggggcctcagtgaaggtctcctgcaaggcttctggatacaccttcaccggctactatatacactgggtgcgtcaggcccctggacaagggcttgagtggatggggtggatcagccctaacagtggtgaaacaagctatgcacagaagtttcaggacagggtcaccatgaccagggacacgtccatcagcacagcctatatggagctgagcagactgagatctgacgacacggccgtgtatttctgtgcgagagaggccacgatttttggaatgcttattgtaccatttgactactggggccagggaaccctggtcaccgtctcctca

SEQ ID NO: 1833 - DNA, 369 bp, synthetic construct
  source 1..369: mol_type = other DNA
caggtgccgctggtgcagtctggggctgaggtgaagaagcctggggcctcagtgaaggtctcctgcaaggcttctggatacaccttcaccggctactatatccactgggtgcgacaggcccctggacaaggacttgagtggatggggtggatcaaccctgaaagtggtggcacagactattcacagaggtttcagggcagggtcaccatgaccagggacacgtccatcagcacagcctacatggaactgagcaggctgagatctgacgacacggccgtgtattactgtgcgagagaggccacgatttttggaatggttattgtaccgtttgactactggggccagggaaccctggtcaccgtctcctca

SEQ ID NO: 1834 - DNA, 369 bp, synthetic construct
  source 1..369: mol_type = other DNA
caggtgccgctggtgcagtctggggctgaggtgaagaagcctggggcctcagtgaaggtctcctgcaaggcttctggatacaccttcaccggctactatatccactgggtgcgacaggcccctggacaaggacttgagtggatggggtggatcaaccctgaaagtggtggcacagactattcacagaggtttcagggcaggttcaccatgaccagggacacgtccatcagcacagcctacatggaactgagcaggctgagatctgacgacacggccgtgtattactgtgcgagagaggccacgatttttggaatggttattgtaccgtttgactactggggccagggaaccctggtcaccgtctcctca

SEQ ID NO: 1835 - DNA, 369 bp, synthetic construct
  source 1..369: mol_type = other DNA
caggtgccgctggtgcagtctggggctgaggtgaagaagcctggggcctcagtgaaggtctcctgcaaggcttctggatacaccttcaccggctactatatccactgggtgcgacaggcccctggacaaggacttgagtggatggggtggatcaaccctgacagtggtggcacagactattcacagaggtttcagggcagggtcaccatgaccagggacacgtccatcagcacagcctacatggaactgagcaggctgagatctgacgacacggccgtgtattactgtgcgagagaggccacgatttttggaatggttattgtaccgtttgactactggggccagggaaccctggtcaccgtctcctca

SEQ ID NO: 1836 - DNA, 369 bp, synthetic construct
  source 1..369: mol_type = other DNA
caggtgcagctggtgcagtctggggctgaggtgaagaagcctggggcctcagtgaaggtctcctgcaaggcttctggatacaccttcaccggctactatatccactgggtgcgacaggcccctggacaaggacttgagtggatggggtggatcaaccctgaaagtggtggcacagactattcacagaggtttcagggcagggtcaccatgaccagggacacgtccatcagcacagcctacatggaactgagcagcctgagatctgacgacacggccgtgtattactgtgcgagagaggccacgatttttggaatggttattgtaccgtttgactactggggccagggaaccctggtcaccgtctcctca

SEQ ID NO: 1837 - DNA, 369 bp, synthetic construct; identical to SEQ ID NO: 1833
  source 1..369: mol_type = other DNA

SEQ ID NO: 1838 - DNA, 369 bp, synthetic construct
  source 1..369: mol_type = other DNA
caggtgccgctggtgcagtctggggctgaggtgaagaagcctggggcctcagtgaaggtctcctgcaaggcttctggatacaccttcaccggctactatatacactgggtgcgtcaggcccctggacaagggcttgagtggatggggtggataagccctaaccaaggtgaaacaaactatgcacagaagtttcaggacagggtcaccatgaccagggacacgtccatcagcacagcctatatggagctgagcaggctgagatctgacgacacggccgtgtattactgtgcgagagaggccacgatttttggaatgcttattgtaccatttgactactggggccagggaaccctggtcaccgtctcctca

SEQ ID NO: 1839 - DNA, 369 bp, synthetic construct
  source 1..369: mol_type = other DNA
caggtgccgctggtgcagtctggggctgaggtgaagaagcctggggcctcagtgaaggtctcctgcaaggcttctggatacaccttcaccggctactatatacactgggtgcgtcaggcccctggacaagggcttgagtggatggggtggataagccctaaccaaggtgacacaaactatgcacagaagtttcaggacagggtcaccatgaccagggacacgtccatcagcacagcctatatggagctgagcaggctgagatctgacgacacggccgtgtattactgtgcgagagaggccacgatttttggaatgcttattgtaccatttgactactggggccagggaaccctggtcaccgtctcctca

SEQ ID NO: 1840 - DNA, 369 bp, synthetic construct
  source 1..369: mol_type = other DNA
caggtgccgctggtgcagtctggggctgaggtgaagaagcctggggcctcagtgaaggtctcctgcaaggcttctggatacaccttcaccggctactatatacactgggtgcgtcaggcccctggacaagggcttgagtggatggggtggataagccctaaccaaggtgaaacaaactatgcacagaagtttcaggacagggtcaccatgaccagggacacgtccatcagcacagcctatatggagctgagcaggctgagatctgacgacacggccgtgtattactgtacgagagaggccacgatttttggaatgcttattgtaccatttgactactggggccagggaaccctggtcaccgtctcctca

SEQ ID NO: 1841 - DNA, 369 bp, synthetic construct
  source 1..369: mol_type = other DNA
caggtgccgctggtgcagtctggggctgaggtgaagaagcctggggcctcagtgaaggtctcctgcaaggcttctggatacaccttcaccggctactatatacactgggtgcgtcaggcccctggacaagggcttgagtggatggggtggataagccctaacaatggtgaaacaaactatgcacagaagtttcaggacagggtcaccatgaccagggacacgtccatcagcacagcctatatggagctgagcaggctgagatctgacgacacggccgtgtattactgtgcgagagaggccacgatttttggaatgcttattgtaccatttgactactggggccagggaaccctggtcaccgtctcctca

SEQ ID NO: 1842 - DNA, 369 bp, synthetic construct
  source 1..369: mol_type = other DNA
caggtgccgctggtgcagtctggggctgaggtgaagaagcctggggcctcagtgaaggtctcctgcaaggcttctggatacaccttcaccggctactatatacactgggtgcgtcaggcccctggacaagggcttgagtggatggggtggataagccctaacaatggtgacacaaactatgcacagaagtttcaggacagggtcaccatgaccagggacacgtccatcagcacagcctatatggagctgagcaggctgagatctgacgacacggccgtgtattactgtgcgagagaggccacgatttttggaatgcttattgtaccatttgactactggggccagggaaccctggtcaccgtctcctca

SEQ ID NO: 1843 - DNA, 369 bp, synthetic construct
  source 1..369: mol_type = other DNA
caggtgccgctggtgcagtctggggctgaggtgaagaagcctggggcctcagtgaaggtctcctgcaaggcttctggatacaccttcaccggctactatatacactgggtgcgtcaggcccctggacaagggcttgagtggatggggtggataagccctaaccaaggtgacacaaactatgcacagaagtttcaggacagggtcaccatgaccagggacacgtccatcagcacagcctatatggagctgagcaggctgagatctgacgacacggccgtgtattactgtacgagagaggccacgatttttggaatgcttattgtaccatttgactactggggccagggaaccctggtcaccgtctcctca

SEQ ID NO: 1844 - DNA, 369 bp, synthetic construct
  source 1..369: mol_type = other DNA
caggtgccgctggtgcagtctggggctgaggtgaagaagcctggggcctcagtgaaggtctcctgcaaggcttctggatacaccttcaccggctactatatacactgggtgcgtcaggcccctggacaagggcttgagtggatggggtggataagccctaacaatggtgaaacaaactatgcacagaagtttcaggacagggtcaccatgaccagggacacgtccatcagcacagcctatatggagctgagcaggctgagatctgacgacacggccgtgtattactgtacgagagaggccacgatttttggaatgcttattgtaccatttgactactggggccagggaaccctggtcaccgtctcctca

SEQ ID NO: 1845 - DNA, 369 bp, synthetic construct; identical to SEQ ID NO: 1838
  source 1..369: mol_type = other DNA

SEQ ID NO: 1846 - DNA, 369 bp, synthetic construct; identical to SEQ ID NO: 1842
  source 1..369: mol_type = other DNA

SEQ ID NO: 1847 - DNA, 369 bp, synthetic construct; identical to SEQ ID NO: 1839
  source 1..369: mol_type = other DNA

SEQ ID NO: 1848 - DNA, 369 bp, synthetic construct; identical to SEQ ID NO: 1841
  source 1..369: mol_type = other DNA

SEQ ID NO: 1849 - DNA, 369 bp, synthetic construct
  source 1..369: mol_type = other DNA
caggtgcagctggtgcagtctggggctgaggtgaagaagcctggggcctcagtgaaggtctcctgcaaggcttctggatacaccttcaccggctactatatacactgggtgcgtcaggcccctggacaagggcttgagtggatggggtggataagccctaaccaaggtgaaacaaactatgcacagaagtttcaggacagggtcaccatgaccagggacacgtccatcagcacagcctatatggagctgagcagcctgagatctgacgacacggccgtgtattactgtgcgagagaggccacgatttttggaatgcttattgtaccatttgactactggggccagggaaccctggtcaccgtctcctca

SEQ ID NO: 1850 - DNA, 369 bp, synthetic construct; identical to SEQ ID NO: 1849
  source 1..369: mol_type = other DNA

SEQ ID NO: 1851 - DNA, 384 bp, synthetic construct; identical to SEQ ID NO: 1728
  source 1..384: mol_type = other DNA

SEQ ID NO: 1852 - DNA, 384 bp, synthetic construct; identical to SEQ ID NO: 1728
  source 1..384: mol_type = other DNA

SEQ ID NO: 1853 - DNA, 384 bp, synthetic construct; identical to SEQ ID NO: 1728
  source 1..384: mol_type = other DNA

SEQ ID NO: 1854 - DNA, 384 bp, synthetic construct; identical to SEQ ID NO: 1728
  source 1..384: mol_type = other DNA

SEQ ID NO: 1855 - DNA, 384 bp, synthetic construct; identical to SEQ ID NO: 1728
  source 1..384: mol_type = other DNA

SEQ ID NO: 1856 - DNA, 384 bp, synthetic construct; identical to SEQ ID NO: 1728
  source 1..384: mol_type = other DNA

SEQ ID NO: 1857 - DNA, 384 bp, synthetic construct; identical to SEQ ID NO: 1728
  source 1..384: mol_type = other DNA

SEQ ID NO: 1858 - DNA, 384 bp, synthetic construct; identical to SEQ ID NO: 1728
  source 1..384: mol_type = other DNA

SEQ ID NO: 1859 - DNA, 384 bp, synthetic construct; identical to SEQ ID NO: 1728
  source 1..384: mol_type = other DNA

SEQ ID NO: 1860 - DNA, 384 bp, synthetic construct; identical to SEQ ID NO: 1728
  source 1..384: mol_type = other DNA

SEQ ID NO: 1861 - DNA, 384 bp, synthetic construct; identical to SEQ ID NO: 1728
  source 1..384: mol_type = other DNA

SEQ ID NO: 1862 - DNA, 384 bp, synthetic construct; identical to SEQ ID NO: 1728
  source 1..384: mol_type = other DNA

SEQ ID NO: 1863 - DNA, 384 bp, synthetic construct
  source 1..384: mol_type = other DNA
cagatgcaggtggtgcagtctggggctgaggtgaagaagcctggggcctcagtgaaggtctcctgcaaggcttccggatacaccttcaccggctactatatgcattgggtgcgacaggcccctggacaagggcttgagtggatgggatggatcaaccctaacagtggtggcacaaactatgcacagaagtttcagggcagggtcaccatgaccagggacacgtccatcagtacagcctacatggagctgagcagcctgaggtctgacgacacggccgtgtattactgtgcgagagggggggattacgttttcgggacttatcggcctcactactactacggtatggacgtctggggccaagggaccacggtcaccgtctcctca

SEQ ID NO: 1864 - DNA, 384 bp, synthetic construct
  source 1..384: mol_type = other DNA
cagatgcaggtggtgcagtctggggctgaggtgaagaagcctggggcctcagtgaaggtctcctgcaaggcttccggatacaccttcaccggctactatatgcattgggtgcgacaggcccctggacaagggcttgagtggatgggatggatcaaccctaacagtggtggcacaaactatgcacagaagtttcagggcagggtcaccatgaccagggacacgtccatcagtacagcctacatggagctgagcaggctgaggtctgacgacacggccgtgtattactgtgcgagagggggggattacgttttcgggacttatcggcctcactactactacggtatggacgtctggggccaagggaccacggtcaccgtctcctca

SEQ ID NO: 1865 - DNA, 363 bp, synthetic construct; identical to SEQ ID NO: 1765
  source 1..363: mol_type = other DNA

SEQ ID NO: 1866 - DNA, 363 bp, synthetic construct; identical to SEQ ID NO: 1747
  source 1..363: mol_type = other DNA

SEQ ID NO: 1867 - DNA, 384 bp, synthetic construct; identical to SEQ ID NO: 1728
  source 1..384: mol_type = other DNA

SEQ ID NO: 1868 - DNA, 363 bp, synthetic construct
  source 1..363: mol_type = other DNA
caggtgcagttggtggagtctgggggaggcgtggtccagcctgggaggtccctgagactctcctgtacagcgtctggattcaccttcagtagctatggcatacactgggtccgccaggctccaggcaaggggctggagtgggtggcagttatatggtatgatggaagtaataagttccatgcagactccgtgaagggccgattcaccatctccagagacaattccaagaacacgctgtatctgcaaatgaacagcctgagagccgaggactcggctatgtacttctgtgcgagaggaaaagtggctggtatgcctgaagcttttgaaatctggggccaagggacaaaggtcaccgtctcttca

SEQ ID NO: 1869 - DNA, 387 bp, synthetic construct
  source 1..387: mol_type = other DNA
caaatgcagctggtgcagtctggggctgaggtgaagaagcctggggcctcagtgaaggtctcctgcaaggcttctggatacaccttcaccagttatgatatcaactgggtgcgacaggccactggacaagggcttgagtggatgggatggatgaaccctaacagtggtaacacaggctatgcacagaagttccagggcagagtcaccatgaccagggacacctccataagcacagcctacatggagctgagcagcctgagatctcaggacacggccgtgtattactgtgcgagagggggtgattacgtttgggggagttatcgtccctactactactactacggtatggacgtctggggccaagggaccacggtcaccgtctcctca

SEQ ID NO: 1870 - DNA, 363 bp, synthetic construct
  source 1..363: mol_type = other DNA
caggtgcagttggtggagtctgggggaggcgtggtccagcctgggaggtccctgagactctcctgtgcagcgtctggattcaccttcagtagctatggcatacactgggtccgccaggctccaggcaaggggctggagtgggtggcagttatatggtatgatgcaagtaataagttccatgcagacgccgtgaagggccgattcaccatctccagagacaattccaagaacacgctgtatctgcaaatgaacagcctgagagccgaggactcggctatgtacttctgtgcgagaggaaaagtggctggtatgcctgaagcttttgaaatctggggccaagggacaaaggtcaccgtctcttca

SEQ ID NO: 1871 - DNA, 363 bp, synthetic construct
  source 1..363: mol_type = other DNA
caggtgcagttggtggagtctgggggaggcgtggtccagcctgggaggtccctgagactctcctgtacagcgtctggattcaccttcagtagctatggcatacactgggtccgccaggctccaggcaaggggctggagtgggtggcagttatatggtatgatgcaagtaataagttccatgcagacgccgtgaagggccgattcaccatctccagagacaattccaagaacacgctgtatctgcaaatgaacagcctgagagccgaggactcggctatgtacttctgtgcgagaggaaaagtggctggtatgcctgaagcttttgaaatctggggccaagggacaaaggtcaccgtctcttca

SEQ ID NO: 1872 - DNA, 363 bp, synthetic construct; identical to SEQ ID NO: 1870
  source 1..363: mol_type = other DNA

SEQ ID NO: 1873 - DNA, 363 bp, synthetic construct
  source 1..363: mol_type = other DNA
caggtgcagttggtggagtctgggggaggcgtggtccagcctgggaggtccctgagactctcctgtgcagcgtctggattcaccttcagtagctatggcatacactgggtccgccaggctccaggcaaggggctggagtgggtggcagttatatggtatgatgcaagtaataagttccatgcagacgccgtgaagggccgattcaccatctccagagacaattccaagaacacgctgtatctgcaaatgaacagcctgagagccgaggactcggctatgtacttctgtgcgagaggaaaagtggctggtatgcctgaagcttttgaaatctggggccaagggacattggtcaccgtctcttca

SEQ ID NO: 1874 - DNA, 363 bp, synthetic construct
  source 1..363: mol_type = other DNA
caggtgcagttggtggagtctgggggaggcgtggtccagcctgggaggtccctgagactctcctgtgcagcgtctggattcaccttcagtagctatggcatacactgggtccgccaggctccaggcaaggggctggagtgggtggcagttatatggtatgatgcaagtaataagttccatgcagactccgtgaagggccgattcaccatctccagagacaattccaagaacacgctgtatctgcaaatgaacagcctgagagccgaggactcggctatgtacttctgtgcgagaggaaaagtggctggtatgcctgaagcttttgaaatctggggccaagggacaaaggtcaccgtctcttca

SEQ ID NO: 1875 - DNA, 363 bp, synthetic construct
  source 1..363: mol_type = other DNA
caggtgcagttggtggagtctgggggaggcgtggtccagcctgggaggtccctgagactctcctgtgcagcgtctggattcaccttcagtagctatggcatacactgggtccgccaggctccaggcaaggggctggagtgggtggcagttatatggtatgatggaagtaataagttccatgcagacgccgtgaagggccgattcaccatctccagagacaattccaagaacacgctgtatctgcaaatgaacagcctgagagccgaggactcggctatgtacttctgtgcgagaggaaaagtggctggtatgcctgaagcttttgaaatctggggccaagggacaaaggtcaccgtctcttca

SEQ ID NO: 1876 - DNA, 387 bp, synthetic construct
  source 1..387: mol_type = other DNA
caaatgcagctggtgcagtctggggctgaggtgaagaagcctggggcctcagtgaaggtctcctgcaaggcttctggatacaccttcaccagttatgatatcaactgggtgcgacaggccactggacaagggcttgagtggatgggatggatgaaccctaacagtggtggcacaggctatgcacagaagttccagggcagagtcaccatgaccagggacacctccataagcacagcctacatggagctgagcagcctgagatctcaggacacggccgtgtattactgtgcgagagggggtgattacgtttgggggagttatcgtccctactactactactacggtatggacgtctggggccaagggaccacggtcaccgtctcctca

SEQ ID NO: 1877 - DNA, 387 bp, synthetic construct; identical to SEQ ID NO: 1869
  source 1..387: mol_type = other DNA

SEQ ID NO: 1878 - DNA, 387 bp, synthetic construct; identical to SEQ ID NO: 1876
  source 1..387: mol_type = other DNA

SEQ ID NO: 1879 - DNA, 387 bp, synthetic construct
  source 1..387: mol_type = other DNA
caaatgcagctggtgcagtctggggctgaggtgaagaagcctggggcctcagtgaaggtctcctgcaaggcttctggatacaccttcaccagttatgatatcaactgggtgcgacaggcccctggacaagggcttgagtggatgggatggatgaaccctaacagtggtggcacaggctatgcacagaagttccagggcagagtcaccatgaccagggacacctccataagcacagcctacatggagctgagcagcctgagatctgacgacacggccgtgtattactgtgcgagagggggtgattacgtttgggggagttatcgtccctactactactactacggtatggacgtctggggccaagggaccacggtcaccgtctcctca

SEQ ID NO: 1880 - DNA, 387 bp, synthetic construct; identical to SEQ ID NO: 1876
  source 1..387: mol_type = other DNA

SEQ ID NO: 1881 - DNA, 387 bp, synthetic construct
  source 1..387: mol_type = other DNA
caaatgcagctggtgcagtctggggctgaggtgaagaagcctggggcctcagtgaaggtctcctgcaaggcttctggatacaccttcaccagttatgatatcaactgggtgcgacaggcccctggacaagggcttgagtggatgggatggatgaaccctaacagtggtaacacaggctatgcacagaagttccagggcagagtcaccatgaccagggacacctccataagcacagcctacatggagctgagcagcctgagatctgacgacacggccgtgtattactgtgcgagagggggtgattacgtttgggggagttatcgtccctactactactactacggtatggacgtctggggccaagggaccacggtcaccgtctcctca

SEQ ID NO: 1882 - DNA, 387 bp, synthetic construct
  source 1..387: mol_type = other DNA
caaatgcagctggtgcagtctggggctgaggtgaagaagcctggggcctcagtgaaggtctcctgcaaggcttctggatacaccttcaccagttatgatatcaactgggtgcgacaggccactggacaagggcttgagtggatgggatggatgaaccctaacagtggtggcacaggctatgcacagaagttccagggcagagtcaccatgaccagggacacctccataagcacagcctacatggagctgagcagcctgagatctcaggacacggccgtgtattactgtgcgagagggggtgattacgttttcgggagttatcgtccctactactactactacggtatggacgtctggggccaagggaccacggtcaccgtctcctca

SEQ ID NO: 1883 - DNA, 387 bp, synthetic construct
  source 1..387: mol_type = other DNA
caaatgcagctggtgcagtctggggctgaggtgaagaagcctggggcctcagtgaaggtctcctgcaaggcttctggatacaccttcaccagttatgatatcaactgggtgcgacaggcccctggacaagggcttgagtggatgggatggatgaaccctaacagtggtggcacaggctatgcacagaagttccagggcagagtcaccatgaccagggacacctccataagcacagcctacatggagctgagcagcctgagatctgacgacacggccgtgtattactgtgcgagagggggtgattacgttttcgggagttatcgtccctactactactactacggtatggacgtctggggccaagggaccacggtcaccgtctcctca

SEQ ID NO: 1884 - DNA, 363 bp, synthetic construct; identical to SEQ ID NO: 1873
  source 1..363: mol_type = other DNA

SEQ ID NO: 1885 - DNA, 648 bp, synthetic construct
  source 1..648: mol_type = other DNA
cagtctgtgctgactcagccaccctcagcgtctgggacccccgggcagagggtcaccatctcttgttctggaagtagctccaacatcggaagtaatactgtaaactggtaccagcacctcccaggaacggcccccaaactcctcatctatactaataatcagcggccctcaggggtccctgaccgattctctggctccaagtctggcacctcagcctcccttgccatcagtgggctccagtctgaggatgaggctgattatttctgtgcaacattcgatgacagcctgaatggtccggtattcggcggagggaccaagctgaccgtcctaggtcagcccaaggctgccccctcggtcactctgttcccgccctcctctgaggagcttcaagccaacaaggccacactggtgtgtctcataagtgacttctacccgggagccgtgacagtggcctggaaggcagatagcagccccgtcaaggcgggagtggagaccaccacaccctccaaacaaagcaacaacaagtacgcggccagcagctatctgagcctgacgcctgagcagtggaagtcccacagaagctacagctgccaggtcacgcatgaagggagcaccgtggagaagacagtggcccctacagaatgttca

SEQ ID NO: 1886 - DNA, 642 bp, synthetic construct
  source 1..642: mol_type = other DNA
gacatccagatgacccagtctccatcctccctgtctgcatctataggagacagagtcaccatcacttgccgggcaagtcaggacattagagattatttaggctggtatcagcagaaaccagggaaagcccctaagcgcctgatctatggtgcatccagtttgcaaagtggggtcccttcaaggttcagcggcagtggatctgggacagaattcactctcacaatcagcagcctgcagcctgaagatttcgcaacttattactgtctacagcataataattaccccttcactttcggccctgggaccaaagtggatatcaaacgaacggtggctgcaccatctgtcttcatcttcccgccatctgatgagcagttgaaatctggaactgcctctgttgtgtgcctgctgaataacttctatcccagagaggccaaagtacagtggaaggtggataacgccctccaatcgggtaactcccaggagagtgtcacagagcaggacagcaaggacagcacctacagcctcagcagcaccctgacgctgagcaaagcagactacgagaaacacaaagtctacgcctgcgaagtcacccatcagggcctgagctcgcccgtcacaaagagcttcaacaggggagagtgt

SEQ ID NO: 1887 - DNA, 642 bp, synthetic construct; identical to SEQ ID NO: 1886
  source 1..642: mol_type = other DNA

SEQ ID NO: 1888 - DNA, 639 bp, synthetic construct
  source 1..639: mol_type = other DNA
gacatccagatgacccagtctccatcctccctgtctgcatctgtaggagacagagtcaccatcacttgccaggcgagtcaggacattagcaactatttaaattggtatcagcagaaaccagggaaagcccctaagctcctgatctacgatgcatccaatttggaaacaggggtcccatcaaggttcagtggaagtggatctgggacagattttagtttcaccatcagcagcctgcagcctgaagatattgcaacatattactgtcaacagtatgatattctcctcactttcggcggagggaccaaggtggagatcaagcgaacggtggctgcaccatctgtcttcatcttcccgccatctgatgagcagttgaaatctggaactgcctctgttgtgtgcctgctgaataacttctatcccagagaggccaaagtacagtggaaggtggataacgccctccaatcgggtaactcccaggagagtgtcacagagcaggacagcaaggacagcacctacagcctcagcagcaccctgacgctgagcaaagcagactacgagaaacacaaagtctacgcctgcgaagtcacccatcagggcctgagctcgcccgtcacaaagagcttcaacaggggagagtgt

SEQ ID NO: 1889 - DNA, 660 bp, synthetic construct
  source 1..660: mol_type = other DNA
gacatcgtgatgacccagtctccagactccctggctgtgtctctgggcgagagggccaccatcaactgcaagtccagccagagtgttttatccagctccaacaataagaactacatagcttggtaccagcagcaaccaggacatcctcctaagctgctcatttactgggcatctacccgggaatccggggtccctgaccgattcagtggcagcgggtctgggacagatttcactctcaccatcagcagcctgcaggctgaagatgtggcagttttttactgtcaacaatattatagtactccgtggacgttcggccaagggaccaaggtggaaatcaaacgaacggtggctgcaccatctgtcttcatcttcccgccatctgatgagcagttgaaatctggaactgcctctgttgtgtgcctgctgaataacttctatcccagagaggccaaagtacagtggaaggtggataacgccctccaatcgggtaactcccaggagagtgtcacagagcaggacagcaaggacagcacctacagcctcagcagcaccctgacgctgagcaaagcagactacgagaaacacaaagtctacgcctgcgaagtcacccatcagggcctgagctcgcccgtcacaaagagcttcaacaggggagagtgt

SEQ ID NO: 1890 - DNA, 660 bp, synthetic construct
  source 1..660: mol_type = other DNA
gacatcgtgatgacccagtctccagactccctggctgtgtctctgggcgagagggccaccatcaactgcaagtccagccagagtgttttatccagctccaacaataagaactacatagcttggtaccagcagaaaccaggacatcctcctaagctgctcatttactgggcatctacccgggaatccggggtccctgaccgattcagtggcagcgggtctgggacagatttcactctcaccatcagcagcctgcaggctgaagatgtggcagttttttactgtcaacaatattatagtactccgtggacgttcggccaagggaccaaggtggaaatcaaacgaacggtggctgcaccatctgtcttcatcttcccgccatctgatgagcagttgaaatctggaactgcctctgttgtgtgcctgctgaataacttctatcccagagaggccaaagtacagtggaaggtggataacgccctccaatcgggtaactcccaggagagtgtcacagagcaggacagcaaggacagcacctacagcctcagcagcaccctgacgctgagcaaagcagactacgagaaacacaaagtctacgcctgcgaagtcacccatcagggcctgagctcgcccgtcacaaagagcttcaacaggggagagtgt

SEQ ID NO: 1891 - DNA, 660 bp, synthetic construct
  source 1..660: mol_type = other DNA
gacatcgtgatgacccagtctccagactccctgtctgtgtctctgggcgagagggccaccatcaactgcaagtccagccagagtgttttatccagctccaacaataagaactacttagcttggtaccaacagaaaccaggacagcctcctaacctgctcatttactggacttctacccgagattccggggtccctgaccgattcagtggcagcgggtctgggacagatttcactctcaccatcaacagcctgcaggctgaagatgtggctgtttattactgtcagcaatattatcgtactccgtggacgttcggccaagggaccaaggtggaaatcaaacgaacggtggctgcaccatctgtcttcatcttcccgccatctgatgagcagttgaaatctggaactgcctctgttgtgtgcctgctgaataacttctatcccagagaggccaaagtacagtggaaggtggataacgccctccaatcgggtaactcccaggagagtgtcacagagcaggacagcaaggacagcacctacagcctcagcagcaccctgacgctgagcaaagcagactacgagaaacacaaagtctacgcctgcgaagtcacccatcagggcctgagctcgcccgtcacaaagagcttcaacaggggagagtgt

SEQ ID NO: 1892 - DNA, 660 bp, synthetic construct
  source 1..660: mol_type = other DNA
gacatcgtgatgacccagtctccagactccctgtctgtgtctctgggcgagagggccaccatcaactgcaagtccagccagagtgttttatccagctccaacaataagaactacttagcttggtaccagcagaaaccaggacagcctcctaacctgctcatttactggacttctacccgagattccggggtccctgaccgattcagtggcagcgggtctgggacagatttcactctcaccatcaacagcctgcaggctgaagatgtggctgtttattactgtcagcaatattatcgtactccgtggacgttcggccaagggaccaaggtggaaatcaaacgaacggtggctgcaccatctgtcttcatcttcccgccatctgatgagcagttgaaatctggaactgcctctgttgtgtgcctgctgaataacttctatcccagagaggccaaagtacagtggaaggtggataacgccctccaatcgggtaactcccaggagagtgtcacagagcaggacagcaaggacagcacctacagcctcagcagcaccctgacgctgagcaaagcagactacgagaaacacaaagtctacgcctgcgaagtcacccatcagggcctgagctcgcccgtcacaaagagcttcaacaggggagagtgt

SEQ ID NO: 1893 - DNA, 645 bp, synthetic construct
  source 1..645: mol_type = other DNA
gaaattgtgttgacgcagtctccaggcaccctgtctttgtctccaggggaaagagccaccctctcctgcagggccagtcagagtattagttacagttacttagcctggtaccagcagaaacctggccaggctccccggctcctcatctatggtgcatccagcagggccactggcatcccagacaggttcagtggcagtgggtctgggacagacttcactctcaccatcagcagacaggagcctgatgattttgcagtgtattactgtcagcagtatggtagttcaccgctcactttcggcggagggaccaaggtggagatcaaacgaacggtggctgcaccatctgtcttcatcttcccgccatctgatgagcagttgaaatctggaactgcctctgttgtgtgcctgctgaataacttctatcccagagaggccaaagtacagtggaaggtggataacgccctccaatcgggtaactcccaggagagtgtcacagagcaggacagcaaggacagcacctacagcctcagcagcaccctgacgctgagcaaagcagactacgagaaacacaaagtctacgcctgcgaagtcacccatcagggcctgagctcgcccgtcacaaagagcttcaacaggggagagtgt

SEQ ID NO: 1894 - DNA, 642 bp, synthetic construct
  source 1..642: mol_type = other DNA
gaaatagtgatgacgcagtctccagccaccctgtctgtgtctccaggggaaagagccaccctctcctgcagggccagtcagagtgttagcagcaacttagcctggtaccagcagaaacctggccaggctcccaggctcctcatctatggtgcagccaccagggccactggtatcccagccagggtcagtggcagtgggtctgggacagagttcactctcaccatcagcagcctgcagtctgaagattttgcagtttattactgtcagcagtataataactggcctctcactttcggcggagggaccaaggtggagatcaaacgaacggtggctgcaccatctgtcttcatcttcccgccatctgatgagcagttgaaatctggaactgcctctgttgtgtgcctgctgaataacttctatcccagagaggccaaagtacagtggaaggtggataacgccctccaatcgggtaactcccaggagagtgtcacagagcaggacagcaaggacagcacctacagcctcagcagcaccctgacgctgagcaaagcagactacgagaaacacaaagtctacgcctgcgaagtcacccatcagggcctgagctcgcccgtcacaaagagcttcaacaggggagagtgt

SEQ ID NO: 1895 - DNA, 642 bp, synthetic construct
  source 1..642: mol_type = other DNA
gacattcagatgacccagtctccatcctccctgtctgcatctgtaggagacagagtcaccatcacttgccgggcaagtcagggcattagaaatgagttaggctggtatcagcagaaaccagggaaagcccctaaacgcctgatctatggtgcatccagtttgcaaagtggggtcccatcaaggttcagcggcagtggatctgggacagagttcactctcacaatcagcagcctgcagcctgaagattttgtaacttattactgtctacagcataatagttacccattcactttcggccctgggaccaaagtggatgtcaaacgaacggtggctgcaccatctgtcttcatcttcccgccatctgatgagcagttgaaatctggaactgcctctgttgtgtgcctgctgaataacttctatcccagagaggccaaagtacagtggaaggtggataacgccctccaatcgggtaactcccaggagagtgtcacagagcaggacagcaaggacagcacctacagcctcagcagcaccctgacgctgagcaaagcagactacgagaaacacaaagtctacgcctgcgaagtcacccatcagggcctgagctcgcccgtcacaaagagcttcaacaggggagagtgt

SEQ ID NO: 1896 - DNA, 639 bp, synthetic construct
  source 1..639: mol_type = other DNA
gacatccagatgacccagtctccatcctccctgtctgcatctgtgggggacagagtcaccatcacttgccaggcgagtcaggacattaccaactatttaaattggtatcagcagaaaccagggaaagcccctaaactcctgatctacgatgcttccaatttggagccaggggtcccatcaaggttcagtggaagtggatctgggacagattttactttcaccatcagcagcctgcagcctgaagatattgcaacatattactgtcaacagtatgatgatctattcactttcggccctgggaccaaagtggatatcaaacgaacggtggctgcaccatctgtcttcatcttcccgccatctgatgagcagttgaaatctggaactgcctctgttgtgtgcctgctgaataacttctatcccagagaggccaaagtacagtggaaggtggataacgccctccaatcgggtaactcccaggagagtgtcacagagcaggacagcaaggacagcacctacagcctcagcagcaccctgacgctgagcaaagcagactacgagaaacacaaagtctacgcctgcgaagtcacccatcagggcctgagctcgcccgtcacaaagagcttcaacaggggagagtgt

SEQ ID NO: 1897 - DNA, 642 bp, synthetic construct
  source 1..642: mol_type = other DNA
gacatccagatgacccagtctccatcttccgtgtctgcatctgtaggagacagagtcaccatcacttgtcgggcgagtcagggtcttatcatctggttagcctggtatcagcagaaaccggggaaagcccctaaactcctgatctatgctgcatccagtttgcaaagtggggtcccatcaaggttcagcggcagtggctctgggacagatttcactctcaccatcagcagcctacagcctgaagattttgcaacttactattgtcaacagactaacagtttccctccgacgttcggccaagggaccaaggtggaaatcaaacgaacggtggctgcaccatctgtcttcatcttcccgccatctgatgagcagttgaaatctggaactgcctctgttgtgtgcctgctgaataacttctatcccagagaggccaaagtacagtggaaggtggataacgccctccaatcgggtaactcccaggagagtgtcacagagcaggacagcaaggacagcacctacagcctcagcagcaccctgacgctgagcaaagcagactacgagaaacacaaagtctacgcctgcgaagtcacccatcagggcctgagctcgcccgtcacaaagagcttcaacaggggagagtgt

SEQ ID NO: 1898 - DNA, 642 bp, synthetic construct; identical to SEQ ID NO: 1897
  source 1..642: mol_type = other DNA

SEQ ID NO: 1899 - DNA, 642 bp, synthetic construct
  source 1..642: mol_type = other DNA
gacattcagatgacccagtctccatcctccctgtctgcatctgtaggagacagagtcaccatcacttgccgggcaagtcagggcattagaaatgagttaggctggtatcagcagaaaccagggaaagcccctaaactcctgatctatggtgcatccagtttgcaaagtggggtcccatcaaggttcagcggcagtggatctgggacagagttcactctcacaatcagcagcctgcagcctgaagattttgtaacttattactgtctacagcataatagttacccattcactttcggccaagggaccaaagtggatgtcaaacgaacggtggctgcaccatctgtcttcatcttcccgccatctgatgagcagttgaaatctggaactgcctctgttgtgtgcctgctgaataacttctatcccagagaggccaaagtacagtggaaggtggataacgccctccaatcgggtaactcccaggagagtgtcacagagcaggacagcaaggacagcacctacagcctcagcagcaccctgacgctgagcaaagcagactacgagaaacacaaagtctacgcctgcgaagtcacccatcagggcctgagctcgcccgtcacaaagagcttcaacaggggagagtgt

SEQ ID NO: 1900 - DNA, 642 bp, synthetic construct; identical to SEQ ID NO: 1899
  source 1..642: mol_type = other DNA

SEQ ID NO: 1901 - DNA, 642 bp, synthetic construct; identical to SEQ ID NO: 1899
  source 1..642: mol_type = other DNA

SEQ ID NO: 1902 - DNA, 642 bp, synthetic construct
  source 1..642: mol_type = other DNA
gacattcagatgacccagtctccatcctccctgtctgcatctgtaggagacagagtcaccatcacttgccgggcaagtcagggcattagaaatgagttaggctggtatcagcagaaaccagggaaagcccctaaactcctgatctatggtgcatccagtttgcaaagtggggtcccatcaaggttcagcggcagtggatctgggacagagttcactctcacaatcagcagcctgcagcctgaagattttgtaacttattactgtctacagcataatagttacccattcactttcggccctgggaccaaagtggatgtcaaacgaacggtggctgcaccatctgtcttcatcttcccgccatctgatgagcagttgaaatctggaactgcctctgttgtgtgcctgctgaataacttctatcccagagaggccaaagtacagtggaaggtggataacgccctccaatcgggtaactcccaggagagtgtcacagagcaggacagcaaggacagcacctacagcctcagcagcaccctgacgctgagcaaagcagactacgagaaacacaaagtctacgcctgcgaagtcacccatcagggcctgagctcgcccgtcacaaagagcttcaacaggggagagtgt

SEQ ID NO: 1903 - DNA, 642 bp, synthetic construct
  source 1..642: mol_type = other DNA
gacattcagatgacccagtctccatcctccctgtctgcatctgtaggagacagagtcaccatcacttgccgggcaagtcagggcattagaaatgagttaggctggtatcagcagaaaccagggaaagcccctaaacgcctgatctatggtgcatccagtttgcaaagtggggtcccatcaaggttcagcggcagtggatctgggacagagttcactctcacaatcagcagcctgcagcctgaagattttgtaacttattactgtctacagcataatagttacccattcactttcggccaagggaccaaagtggatgtcaaacgaacggtggctgcaccatctgtcttcatcttcccgccatctgatgagcagttgaaatctggaactgcctctgttgtgtgcctgctgaataacttctatcccagagaggccaaagtacagtggaaggtggataacgccctccaatcgggtaactcccaggagagtgtcacagagcaggacagcaaggacagcacctacagcctcagcagcaccctgacgctgagcaaagcagactacgagaaacacaaagtctacgcctgcgaagtcacccatcagggcctgagctcgcccgtcacaaagagcttcaacaggggagagtgt

SEQ ID NO: 1904 - DNA, 642 bp, synthetic construct; identical to SEQ ID NO: 1899
  source 1..642: mol_type = other DNA

SEQ ID NO: 1905 - DNA, 642 bp, synthetic construct
  source 1..642: mol_type = other DNA
gacatccagatgacccagtctccatcctccctgtctgcatctataggagacagagtcaccatcacttgccgggcaagtcaggacattagagattatttaggctggtatcagcagaaaccagggaaagcccctaagctcctgatctatggtgcatccagtttgcaaagtggggtcccttcaaggttcagcggcagtggatctgggacagaattcactctcacaatcagcagcctgcagcctgaagatttcgcaacttattactgtctacagcataataattaccccttcactttcggccaagggaccaaagtggatatcaaacgaacggtggctgcaccatctgtcttcatcttcccgccatctgatgagcagttgaaatctggaactgcctctgttgtgtgcctgctgaataacttctatcccagagaggccaaagtacagtggaaggtggataacgccctccaatcgggtaactcccaggagagtgtcacagagcaggacagcaaggacagcacctacagcctcagcagcaccctgacgctgagcaaagcagactacgagaaacacaaagtctacgcctgcgaagtcacccatcagggcctgagctcgcccgtcacaaagagcttcaacaggggagagtgt

SEQ ID NO: 1906 - DNA, 642 bp, synthetic construct
  source 1..642: mol_type = other DNA
gacatccagatgacccagtctccatcctccctgtctgcatctataggagacagagtcaccatcacttgccgggcaagtcaggacattagagattatttaggctggtatcagcagaaaccagggaaagcccctaagcgcctgatctatggtgcatccagtttgcaaagtggggtcccttcaaggttcagcggcagtggatctgggacagaattcactctcacaatcagcagcctgcagcctgaagatttcgcaacttattactgtctacagcataataattaccccttcactttcggccaagggaccaaagtggatatcaaacgaacggtggctgcaccatctgtcttcatcttcccgccatctgatgagcagttgaaatctggaactgcctctgttgtgtgcctgctgaataacttctatcccagagaggccaaagtacagtggaaggtggataacgccctccaatcgggtaactcccaggagagtgtcacagagcaggacagcaaggacagcacctacagcctcagcagcaccctgacgctgagcaaagcagactacgagaaacacaaagtctacgcctgcgaagtcacccatcagggcctgagctcgcccgtcacaaagagcttcaacaggggagagtgt

SEQ ID NO: 1907 - DNA, 642 bp, synthetic construct
  source 1..642: mol_type = other DNA
gacatccagatgacccagtctccatcctccctgtctgcatctataggagacagagtcaccatcacttgccgggcaagtcaggacattagagattatttaggctggtatcagcagaaaccagggaaagcccctaagctcctgatctatggtgcatccagtttgcaaagtggggtcccttcaaggttcagcggcagtggatctgggacagaattcactctcacaatcagcagcctgcagcctgaagatttcgcaacttattactgtctacagcataataattaccccttcactttcggccctgggaccaaagtggatatcaaacgaacggtggctgcaccatctgtcttcatcttcccgccatctgatgagcagttgaaatctggaactgcctctgttgtgtgcctgctgaataacttctatcccagagaggccaaagtacagtggaaggtggataacgccctccaatcgggtaactcccaggagagtgtcacagagcaggacagcaaggacagcacctacagcctcagcagcaccctgacgctgagcaaagcagactacgagaaacacaaagtctacgcctgcgaagtcacccatcagggcctgagctcgcccgtcacaaagagcttcaacaggggagagtgt

SEQ ID NO: 1908 - DNA, 642 bp, synthetic construct; identical to SEQ ID NO: 1905
  source 1..642: mol_type = other DNA

SEQ ID NO: 1909 - DNA, 642 bp, synthetic construct; identical to SEQ ID NO: 1905
  source 1..642: mol_type = other DNA

SEQ ID NO: 1910 - DNA, 642 bp, synthetic construct; identical to SEQ ID NO: 1905
  source 1..642: mol_type = other DNA

SEQ ID NO: 1911 - DNA, 642 bp, synthetic construct; identical to SEQ ID NO: 1905
  source 1..642: mol_type = other DNA

SEQ ID NO: 1912 - DNA, 642 bp, synthetic construct
  source 1..642: mol_type = other DNA
gacatccagatgacccagtctccatcctccctgtctgcatctataggagacagagtcaccatcacttgccgggcaagtcaggaccttagaaattatttaggctggtatcaccagaaaccagggaaagcccctaagcgcctgatctatggtgcatccagtttgcaaagtggggtcccttcaaggttcagcggcagtggatctgggacagaattcactctcacaatcagcagcctgcagcctgaagatttcgcaacttattactgtctacagcataataattaccccttcactttcggccctgggaccaaagtggatatcaaacgaacggtggctgcaccatctgtcttcatcttcccgccatctgatgagcagttgaaatctggaactgcctctgttgtgtgcctgctgaataacttctatcccagagaggccaaagtacagtggaaggtggataacgccctccaatcgggtaactcccaggagagtgtcacagagcaggacagcaaggacagcacctacagcctcagcagcaccctgacgctgagcaaagcagactacgagaaacacaaagtctacgcctgcgaagtcacccatcagggcctgagctcgcccgtcacaaagagcttcaacaggggagagtgt

SEQ ID NO: 1913 - DNA, 642 bp, synthetic construct
  source 1..642: mol_type = other DNA
gacatccagatgacccagtctccatcctccctgtctgcatctataggagacagagtcaccatcacttgccgggcaagtcaggaccttagaaattatttaggctggtatcaacagaaaccagggaaagcccctaagctcctgatctatggtgcatccagtttgcaaagtggggtcccttcaaggttcagcggcagtggatctgggacagaattcactctcacaatcagcagcctgcagcctgaagatttcgcaacttattactgtctacagcataataattaccccttcactttcggccctgggaccaaagtggatatcaaacgaacggtggctgcaccatctgtcttcatcttcccgccatctgatgagcagttgaaatctggaactgcctctgttgtgtgcctgctgaataacttctatcccagagaggccaaagtacagtggaaggtggataacgccctccaatcgggtaactcccaggagagtgtcacagagcaggacagcaaggacagcacctacagcctcagcagcaccctgacgctgagcaaagcagactacgagaaacacaaagtctacgcctgcgaagtcacccatcagggcctgagctcgcccgtcacaaagagcttcaacaggggagagtgt

SEQ ID NO: 1914 - DNA, 642 bp, synthetic construct; identical to SEQ ID NO: 1913
  source 1..642: mol_type = other DNA

SEQ ID NO: 1915 - DNA, 642 bp, synthetic construct
  source 1..642: mol_type = other DNA
gacatccagatgacccagtctccatcctccctgtctgcatctataggagacagagtcaccatcacttgccgggcaagtcaggaccttagaaattatttaggctggtatcaccagaaaccagggaaagcccctaagctcctgatctatggtgcatccagtttgcaaagtggggtcccttcaaggttcagcggcagtggatctgggacagaattcactctcacaatcagcagcctgcagcctgaagatttcgcaacttattactgtctacagcataataattaccccttcactttcggccctgggaccaaagtggatatcaaacgaacggtggctgcaccatctgtcttcatcttcccgccatctgatgagcagttgaaatctggaactgcctctgttgtgtgcctgctgaataacttctatcccagagaggccaaagtacagtggaaggtggataacgccctccaatcgggtaactcccaggagagtgtcacagagcaggacagcaaggacagcacctacagcctcagcagcaccctgacgctgagcaaagcagactacgagaaacacaaagtctacgcctgcgaagtcacccatcagggcctgagctcgcccgtcacaaagagcttcaacaggggagagtgt

SEQ ID NO: 1916 - DNA, 642 bp, synthetic construct
  source 1..642: mol_type = other DNA
gacatccagatgacccagtctccatcctccctgtctgcatctataggagacagagtcaccatcacttgccgggcaagtcaggaccttagaaattatttaggctggtatcaacagaaaccagggaaagcccctaagcgcctgatctatggtgcatccagtttgcaaagtggggtcccttcaaggttcagcggcagtggatctgggacagaattcactctcacaatcagcagcctgcagcctgaagatttcgcaacttattactgtctacagcataataattaccccttcactttcggccctgggaccaaagtggatatcaaacgaacggtggctgcaccatctgtcttcatcttcccgccatctgatgagcagttgaaatctggaactgcctctgttgtgtgcctgctgaataacttctatcccagagaggccaaagtacagtggaaggtggataacgccctccaatcgggtaactcccaggagagtgtcacagagcaggacagcaaggacagcacctacagcctcagcagcaccctgacgctgagcaaagcagactacgagaaacacaaagtctacgcctgcgaagtcacccatcagggcctgagctcgcccgtcacaaagagcttcaacaggggagagtgt

SEQ ID NO: 1917 - DNA, 642 bp, synthetic construct; identical to SEQ ID NO: 1916
  source 1..642: mol_type = other DNA

SEQ ID NO: 1918 - DNA, 642 bp, synthetic construct; identical to SEQ ID NO: 1915
  source 1..642: mol_type = other DNA

SEQ ID NO: 1919 - DNA, 642 bp, synthetic construct; identical to SEQ ID NO: 1912
  source 1..642: mol_type = other DNA

SEQ ID NO: 1920 - DNA, 642 bp, synthetic construct; identical to SEQ ID NO: 1913
  source 1..642: mol_type = other DNA

SEQ ID NO: 1921 - DNA, 642 bp, synthetic construct; identical to SEQ ID NO: 1913
  source 1..642: mol_type = other DNA

SEQ ID NO: 1922 - DNA, 642 bp, synthetic construct
  source 1..642: mol_type = other DNA
gacatccagatgacccagtctccatcctccctgtctgcatctataggagacagagtcaccatcacttgccgggcaagtcaggaccttagaaattatttaggctggtatcaacagaaaccagggaaagcccctaagctcctgatctatggtgcatccagtttgcaaagtggggtcccttcaaggttcagcggcagtggatctgggacagaattcactctcacaatcagcagcctgcagcctgaagatttcgcaacttattactgtctacagcataataattaccccttcactttcggccaagggaccaaagtggatatcaaacgaacggtggctgcaccatctgtcttcatcttcccgccatctgatgagcagttgaaatctggaactgcctctgttgtgtgcctgctgaataacttctatcccagagaggccaaagtacagtggaaggtggataacgccctccaatcgggtaactcccaggagagtgtcacagagcaggacagcaaggacagcacctacagcctcagcagcaccctgacgctgagcaaagcagactacgagaaacacaaagtctacgcctgcgaagtcacccatcagggcctgagctcgcccgtcacaaagagcttcaacaggggagagtgt

SEQ ID NO: 1923 - DNA, 642 bp, synthetic construct; identical to SEQ ID NO: 1913
  source 1..642: mol_type = other DNA

SEQ ID NO: 1924 - DNA, 639 bp, synthetic construct
  source 1..639: mol_type = other DNA
gacatccagatgacccagtctccatcctccctgtctgcatctgtaggagacagagtcaccatcacttgccaggcgagtcaggacattagcaactatttaaattggtatcagcagaaaccagggaaagcccctaagctcctgatctacgatgcatccaatttggaaacaggggtcccatcaaggttcagtggaagtggatctgggacagattttagtctcaccatcagcagcctgcagcctgaagattttgcaacatattactgtcaacagtatgatattctcctcactttcggcggagggaccaaggtggagatcaagcgaacggtggctgcaccatctgtcttcatcttcccgccatctgatgagcagttgaaatctggaactgcctctgttgtgtgcctgctgaataacttctatcccagagaggccaaagtacagtggaaggtggataacgccctccaatcgggtaactcccaggagagtgtcacagagcaggacagcaaggacagcacctacagcctcagcagcaccctgacgctgagcaaagcagactacgagaaacacaaagtctacgcctgcgaagtcacccatcagggcctgagctcgcccgtcacaaagagcttcaacaggggagagtgt

SEQ ID NO: 1925 - DNA, 639 bp, synthetic construct; identical to SEQ ID NO: 1924
  source 1..639: mol_type = other DNA

SEQ ID NO: 1926 - DNA, 639 bp, synthetic construct
  source 1..639: mol_type = other DNA
gacatccagatgacccagtctccatcctccctgtctgcatctgtaggagacagagtcaccatcacttgccaggcgagtcaggacattagcaactatttaaattggtatcagcagaaaccagggaaagcccctaagctcctgatctacgatgcatccaatttggaaacaggggtcccatcaaggttcagtggaagtggatctgggacagattttagtctcaccatcagcagcctgcagcctgaagatattgcaacatattactgtcaacagtatgatattctcctcactttcggcggagggaccaaggtggagatcaagcgaacggtggctgcaccatctgtcttcatcttcccgccatctgatgagcagttgaaatctggaactgcctctgttgtgtgcctgctgaataacttctatcccagagaggccaaagtacagtggaaggtggataacgccctccaatcgggtaactcccaggagagtgtcacagagcaggacagcaaggacagcacctacagcctcagcagcaccctgacgctgagcaaagcagactacgagaaacacaaagtctacgcctgcgaagtcacccatcagggcctgagctcgcccgtcacaaagagcttcaacaggggagagtgt

SEQ ID NO: 1927 - DNA, 639 bp, synthetic construct
  source 1..639: mol_type = other DNA
gacatccagatgacccagtctccatcctccctgtctgcatctgtaggagacagagtcaccatcacttgccaggcgagtcaggacattagcaactatttaaattggtatcagcagaaaccagggaaagcccctaagctcctgatctacgatgcatccaatttggaaacaggggtcccatcaaggttcagtggaagtggatctgggacagattttagtttcaccatcagcagcctgcagcctgaagattttgcaacatattactgtcaacagtatgatattctcctcactttcggcggagggaccaaggtggagatcaagcgaacggtggctgcaccatctgtcttcatcttcccgccatctgatgagcagttgaaatctggaactgcctctgttgtgtgcctgctgaataacttctatcccagagaggccaaagtacagtggaaggtggataacgccctccaatcgggtaactcccaggagagtgtcacagagcaggacagcaaggacagcacctacagcctcagcagcaccctgacgctgagcaaagcagactacgagaaacacaaagtctacgcctgcgaagtcacccatcagggcctgagctcgcccgtcacaaagagcttcaacaggggagagtgt

SEQ ID NO: 1928 - DNA, 639 bp, synthetic construct; identical to SEQ ID NO: 1926
  source 1..639: mol_type = other DNA

SEQ ID NO: 1929 - DNA, 639 bp, synthetic construct; identical to SEQ ID NO: 1927
  source 1..639: mol_type = other DNA

SEQ ID NO: 1930 - DNA, 639 bp, synthetic construct; identical to SEQ ID NO: 1888
  source 1..639: mol_type = other DNA

SEQ ID NO: 1931 - DNA, 639 bp, synthetic construct; identical to SEQ ID NO: 1924
  source 1..639: mol_type = other DNA

SEQ ID NO: 1932 - DNA, 639 bp, synthetic construct; identical to SEQ ID NO: 1924
  source 1..639: mol_type = other DNA

SEQ ID NO: 1933 - DNA, 642 bp, synthetic construct; identical to SEQ ID NO: 1886
  source 1..642: mol_type = other DNA

SEQ ID NO: 1934 - DNA, 642 bp, synthetic construct; identical to SEQ ID NO: 1886
  source 1..642: mol_type = other DNA

SEQ ID NO: 1935 - DNA, 642 bp, synthetic construct; identical to SEQ ID NO: 1905
  source 1..642: mol_type = other DNA

SEQ ID NO: 1936 - DNA, 642 bp, synthetic construct; identical to SEQ ID NO: 1905
  source 1..642: mol_type = other DNA

SEQ ID NO: 1937 - DNA, 642 bp, synthetic construct; identical to SEQ ID NO: 1907
  source 1..642: mol_type = other DNA

SEQ ID NO: 1938 - DNA, 642 bp, synthetic construct; identical to SEQ ID NO: 1907
  source 1..642: mol_type = other DNA

SEQ ID NO: 1939 - DNA, 642 bp, synthetic construct; identical to SEQ ID NO: 1907
  source 1..642: mol_type = other DNA

SEQ ID NO: 1940 - DNA, 639 bp, synthetic construct
  source 1..639: mol_type = other DNA
gacatccagatgacccagtctccatcctccctgtctgcatctgtgggggacagagtcaccatcacttgccaggcgagtcaggacattaccaactatttaaattggtatcagcagaaaccagggaaagcccctaaactcctgatctacgatgcttccaatttggagccaggggtcccatcaaggttcagtggaagtggatctgggacagattttactctcaccatcagcagcctgcagcctgaagattttgcaacatattactgtcaacagtatgatgatctattcactttcggccctgggaccaaagtggatatcaaacgaacggtggctgcaccatctgtcttcatcttcccgccatctgatgagcagttgaaatctggaactgcctctgttgtgtgcctgctgaataacttctatcccagagaggccaaagtacagtggaaggtggataacgccctccaatcgggtaactcccaggagagtgtcacagagcaggacagcaaggacagcacctacagcctcagcagcaccctgacgctgagcaaagcagactacgagaaacacaaagtctacgcctgcgaagtcacccatcagggcctgagctcgcccgtcacaaagagcttcaacaggggagagtgt

SEQ ID NO: 1941 - DNA, 639 bp, synthetic construct
  source 1..639: mol_type = other DNA
gacatccagatgacccagtctccatcctccctgtctgcatctgtgggggacagagtcaccatcacttgccaggcgagtcaggacattaccaactatttaaattggtatcagcagaaaccagggaaagcccctaaactcctgatctacgatgcttccaatttggagccaggggtcccatcaaggttcagtggaagtggatctgggacagattttactctcaccatcagcagcctgcagcctgaagatattgcaacatattactgtcaacagtatgatgatctattcactttcggccctgggaccaaagtggatatcaaacgaacggtggctgcaccatctgtcttcatcttcccgccatctgatgagcagttgaaatctggaactgcctctgttgtgtgcctgctgaataacttctatcccagagaggccaaagtacagtggaaggtggataacgccctccaatcgggtaactcccaggagagtgtcacagagcaggacagcaaggacagcacctacagcctcagcagcaccctgacgctgagcaaagcagactacgagaaacacaaagtctacgcctgcgaagtcacccatcagggcctgagctcgcccgtcacaaagagcttcaacaggggagagtgt

SEQ ID NO: 1942 - DNA, 639 bp, synthetic construct; identical to SEQ ID NO: 1940
  source 1..639: mol_type = other DNA

SEQ ID NO: 1943 - DNA, 639 bp, synthetic construct
  source 1..639: mol_type = other DNA
gacatccagatgacccagtctccatcctccctgtctgcatctgtgggggacagagtcaccatcacttgccaggcgagtcaggacattaccaactatttaaattggtatcagcagaaaccagggaaagcccctaaactcctgatctacgatgcttccaatttggagccaggggtcccatcaaggttcagtggaagtggatctgggacagattttactttcaccatcagcagcctgcagcctgaagattttgcaacatattactgtcaacagtatgatgatctattcactttcggccctgggaccaaagtggatatcaaacgaacggtggctgcaccatctgtcttcatcttcccgccatctgatgagcagttgaaatctggaactgcctctgttgtgtgcctgctgaataacttctatcccagagaggccaaagtacagtggaaggtggataacgccctccaatcgggtaactcccaggagagtgtcacagagcaggacagcaaggacagcacctacagcctcagcagcaccctgacgctgagcaaagcagactacgagaaacacaaagtctacgcctgcgaagtcacccatcagggcctgagctcgcccgtcacaaagagcttcaacaggggagagtgt

SEQ ID NO: 1944 - DNA, 639 bp, synthetic construct; identical to SEQ ID NO: 1941
  source 1..639: mol_type = other DNA

SEQ ID NO: 1945 - DNA, 639 bp, synthetic construct; identical to SEQ ID NO: 1943
  source 1..639: mol_type = other DNA

SEQ ID NO: 1946 - DNA, 639 bp, synthetic construct; identical to SEQ ID NO: 1896
  source 1..639: mol_type = other DNA

SEQ ID NO: 1947 - DNA, 639 bp, synthetic construct; identical to SEQ ID NO: 1940
  source 1..639: mol_type = other DNA

SEQ ID NO: 1948 - DNA, 639 bp, synthetic construct; identical to SEQ ID NO: 1940
  source 1..639: mol_type = other DNA

SEQ ID NO: 1949 - DNA, 639 bp, synthetic construct
  source 1..639: mol_type = other DNA
gacatccagatgacccagtctccatcctccctgtctgcatctgtgggggacagagtcaccatcacttgccaggcgagtcaggacattaccaactatttaaattggtatcagcagaaaccagggaaagcccctaaactcctgatctacgatgcttccaatttggagccaggggtcccatcaaggttcagtggaagtggatctgggacagattttactctcaccatcagcagcctgcagcctgaagattttgcaacatattactgtcaacagtatgatgatctattcactttcggccaagggaccaaagtggatatcaaacgaacggtggctgcaccatctgtcttcatcttcccgccatctgatgagcagttgaaatctggaactgcctctgttgtgtgcctgctgaataacttctatcccagagaggccaaagtacagtggaaggtggataacgccctccaatcgggtaactcccaggagagtgtcacagagcaggacagcaaggacagcacctacagcctcagcagcaccctgacgctgagcaaagcagactacgagaaacacaaagtctacgcctgcgaagtcacccatcagggcctgagctcgcccgtcacaaagagcttcaacaggggagagtgt

SEQ ID NO: 1950 - DNA, 639 bp, synthetic construct; identical to SEQ ID NO: 1949
  source 1..639: mol_type = other DNA

SEQ ID NO: 1951 - DNA, 642 bp, synthetic construct
  source 1..642: mol_type = other DNA
gaaattgtgttgacgcagtctccaggcaccctgtctttgtctccaggggaaagagccaccctctcctgcagggccagtcagatttttaccagcacctacttagcctggtaccagcagaaacctggccaggctcccaggctcctcatctatggtgcatccagcagggccactggcatcccagacaggttcagtggcagtgggtctgggacagacttcactctcaccatcagcagattggagcctgaagattttgcagtgtattactgtcagcagtatggtagctcacctcgcttcggccaagggacacgactggagattaaacgaacggtggctgcaccatctgtcttcatcttcccgccatctgatgagcagttgaaatctggaactgcctctgttgtgtgcctgctgaataacttctatcccagagaggccaaagtacagtggaaggtggataacgccctccaatcgggtaactcccaggagagtgtcacagagcaggacagcaaggacagcacctacagcctcagcagcaccctgacgctgagcaaagcagactacgagaaacacaaagtctacgcctgcgaagtcacccatcagggcctgagctcgcccgtcacaaagagcttcaacaggggagagtgt

SEQ ID NO: 1952 - DNA, 642 bp, synthetic construct; identical to SEQ ID NO: 1951
  source 1..642: mol_type = other DNA

SEQ ID NO: 1953 - DNA, 642 bp, synthetic construct; identical to SEQ ID NO: 1951
  source 1..642: mol_type = other DNA

SEQ ID NO: 1954 - DNA, 642 bp, synthetic construct; identical to SEQ ID NO: 1951
  source 1..642: mol_type = other DNA

SEQ ID NO: 1955 - DNA, 642 bp, synthetic construct
  source 1..642: mol_type = other DNA
gaaatagtgatgacgcagtctccagccaccctgtctgtgtctccaggggaaagagccaccctctcctgcagggccagtcagagtgttagcagcaacttagcctggtaccagcagaaacctggccaggctcccaggctcctcatctatggtgcagccaccagggccactggtatcccagccaggttcagtggcagtgggtctgggacagagttcactctcaccatcagcagcctgcagtctgaagattttgcagtttattactgtcagcagtataataactggcctctcactttcggcggagggaccaaggtggagatcaaacgaacggtggctgcaccatctgtcttcatcttcccgccatctgatgagcagttgaaatctggaactgcctctgttgtgtgcctgctgaataacttctatcccagagaggccaaagtacagtggaaggtggataacgccctccaatcgggtaactcccaggagagtgtcacagagcaggacagcaaggacagcacctacagcctcagcagcaccctgacgctgagcaaagcagactacgagaaacacaaagtctacgcctgcgaagtcacccatcagggcctgagctcgcccgtcacaaagagcttcaacaggggagagtgt

SEQ ID NO: 1956 - DNA, 642 bp, synthetic construct; identical to SEQ ID NO: 1955
  source 1..642: mol_type = other DNA

SEQ ID NO: 1957 - DNA, 642 bp, synthetic construct; identical to SEQ ID NO: 1955
  source 1..642: mol_type = other DNA

SEQ ID NO: 1958 - DNA, 642 bp, synthetic construct; identical to SEQ ID NO: 1894
  source 1..642: mol_type = other DNA

SEQ ID NO: 1959 - DNA, 642 bp, synthetic construct
  source 1..642: mol_type = other DNA
gaaatagtgatgacgcagtctccagccaccctgtctgtgtctccaggggaaagagccaccctctcctgcagggccagtcagagtgttagcagcaacttagcctggtaccagcagaaacctggccaggctcccaggctcctcatctatggtgcagccaccagggccactggtatcccagccaggttcagtggcagtgggtctgggacagagttcactctcaccatcagcagcctggagcctgaagattttgcagtttattactgtcagcagtataataacttccctctcactttcggcggagggaccaaggtggagatcaaacgaacggtggctgcaccatctgtcttcatcttcccgccatctgatgagcagttgaaatctggaactgcctctgttgtgtgcctgctgaataacttctatcccagagaggccaaagtacagtggaaggtggataacgccctccaatcgggtaactcccaggagagtgtcacagagcaggacagcaaggacagcacctacagcctcagcagcaccctgacgctgagcaaagcagactacgagaaacacaaagtctacgcctgcgaagtcacccatcagggcctgagctcgcccgtcacaaagagcttcaacaggggagagtgt

SEQ ID NO: 1960 - DNA, 642 bp, synthetic construct
  source 1..642: mol_type = other DNA
gaaatagtgatgacgcagtctccagccaccctgtctgtgtctccaggggaaagagccaccctctcctgcagggccagtcagagtgttagcagcaacttagcctggtaccagcagaaacctggccaggctcccaggctcctcatctatggtgcagccaccagggccactggtatcccagccaggttcagtggcagtgggtctgggacagagttcactctcaccatcagcagcctggagcctgaagattttgcagtttattactgtcagcagtataataactatcctctcactttcggcggagggaccaaggtggagatcaaacgaacggtggctgcaccatctgtcttcatcttcccgccatctgatgagcagttgaaatctggaactgcctctgttgtgtgcctgctgaataacttctatcccagagaggccaaagtacagtggaaggtggataacgccctccaatcgggtaactcccaggagagtgtcacagagcaggacagcaaggacagcacctacagcctcagcagcaccctgacgctgagcaaagcagactacgagaaacacaaagtctacgcctgcgaagtcacccatcagggcctgagctcgcccgtcacaaagagcttcaacaggggagagtgt

SEQ ID NO: 1961 - DNA, 642 bp, synthetic construct
  source 1..642: mol_type = other DNA
gaaatagtgatgacgcagtctccagccaccctgtctgtgtctccaggggaaagagccaccctctcctgcagggccagtcagagtgttagcagcaacttagcctggtaccagcagaaacctggccaggctcccaggctcctcatctatggtgcagccaccagggccactggtatcccagccaggttcagtggcagtgggtctgggacagagttcactctcaccatcagcagcctggagcctgaagattttgcagtttattactgtcagcagtataataactggcctctcactttcggcggagggaccaaggtggagatcaaacgaacggtggctgcaccatctgtcttcatcttcccgccatctgatgagcagttgaaatctggaactgcctctgttgtgtgcctgctgaataacttctatcccagagaggccaaagtacagtggaaggtggataacgccctccaatcgggtaactcccaggagagtgtcacagagcaggacagcaaggacagcacctacagcctcagcagcaccctgacgctgagcaaagcagactacgagaaacacaaagtctacgcctgcgaagtcacccatcagggcctgagctcgcccgtcacaaagagcttcaacaggggagagtgt

SEQ ID NO: 1962 - DNA, 642 bp, synthetic construct; identical to SEQ ID NO: 1961
  source 1..642: mol_type = other DNA

SEQ ID NO: 1963 - DNA, 645 bp, synthetic construct
  source 1..645: mol_type = other DNA
gaaattgtgttgacgcagtctccaggcaccctgtctttgtctccaggggaaagagccaccctctcctgcagggccagtcagagtattagttacagttacttagcctggtaccagcagaaacctggccaggctccccggctcctcatctatggtgcatccagcagggccactggcatcccagacaggttcagtggcagtgggtctgggacagacttcactctcaccatcagcagactggagcctgatgattttgcagtgtattactgtcagcagtatggtagttcaccgctcactttcggcggagggaccaaggtggagatcaaacgaacggtggctgcaccatctgtcttcatcttcccgccatctgatgagcagttgaaatctggaactgcctctgttgtgtgcctgctgaataacttctatcccagagaggccaaagtacagtggaaggtggataacgccctccaatcgggtaactcccaggagagtgtcacagagcaggacagcaaggacagcacctacagcctcagcagcaccctgacgctgagcaaagcagactacgagaaacacaaagtctacgcctgcgaagtcacccatcagggcctgagctcgcccgtcacaaagagcttcaacaggggagagtgt

SEQ ID NO: 1964 - DNA, 645 bp, synthetic construct; identical to SEQ ID NO: 1893
  source 1..645: mol_type = other DNA

SEQ ID NO: 1965 - DNA, 645 bp, synthetic construct; identical to SEQ ID NO: 1963
  source 1..645: mol_type = other DNA

SEQ ID NO: 1966 - DNA, 645 bp, synthetic construct; identical to SEQ ID NO: 1963
  source 1..645: mol_type = other DNA

SEQ ID NO: 1967 - DNA, 645 bp, synthetic construct; identical to SEQ ID NO: 1963
  source 1..645: mol_type = other DNA

SEQ ID NO: 1968 - DNA, 645 bp, synthetic construct; identical to SEQ ID NO: 1893
  source 1..645: mol_type = other DNA

SEQ ID NO: 1969 - DNA, 645 bp, synthetic construct; identical to SEQ ID NO: 1893
  source 1..645: mol_type = other DNA

SEQ ID NO: 1970 - DNA, 660 bp, synthetic construct; identical to SEQ ID NO: 1889
  source 1..660: mol_type = other DNA

SEQ ID NO: 1971 - DNA, 660 bp, synthetic construct; identical to SEQ ID NO: 1889
  source 1..660: mol_type = other DNA

SEQ ID NO: 1972 - DNA, 660 bp, synthetic construct; identical to SEQ ID NO: 1889
  source 1..660: mol_type = other DNA

SEQ ID NO: 1973 - DNA, 660 bp, synthetic construct; identical to SEQ ID NO: 1889
  source 1..660: mol_type = other DNA

SEQ ID NO: 1974 - DNA, 660 bp, synthetic construct; identical to SEQ ID NO: 1889
  source 1..660: mol_type = other DNA

SEQ ID NO: 1975 - DNA, 660 bp, synthetic construct; identical to SEQ ID NO: 1889
  source 1..660: mol_type = other DNA

SEQ ID NO: 1976 - DNA, 660 bp, synthetic construct; identical to SEQ ID NO: 1889
  source 1..660: mol_type = other DNA

SEQ ID NO: 1977 - DNA, 660 bp, synthetic construct; identical to SEQ ID NO: 1889
  source 1..660: mol_type = other DNA

SEQ ID NO: 1978 - DNA, 660 bp, synthetic construct; identical to SEQ ID NO: 1889
  source 1..660: mol_type = other DNA

SEQ ID NO: 1979 - DNA, 660 bp, synthetic construct
  source 1..660: mol_type = other DNA
gacatcgtgatgacccagtctccagactccctggctgtgtctctgggcgagagggccaccatcaactgcaagtccagccagagtgttttatccagctccaacaataagaactacatagcttggtaccagcagaaaccaggacaacctcctaagctgctcatttactgggcatctacccgggaatccggggtccctgaccgattcagtggcagcgggtctgggacagatttcactctcaccatcagcagcctgcaggctgaagatgtggcagttttttactgtcaacaatattatagtactccgtggacgttcggccaagggaccaaggtggaaatcaaacgaacggtggctgcaccatctgtcttcatcttcccgccatctgatgagcagttgaaatctggaactgcctctgttgtgtgcctgctgaataacttctatcccagagaggccaaagtacagtggaaggtggataacgccctccaatcgggtaactcccaggagagtgtcacagagcaggacagcaaggacagcacctacagcctcagcagcaccctgacgctgagcaaagcagactacgagaaacacaaagtctacgcctgcgaagtcacccatcagggcctgagctcgcccgtcacaaagagcttcaacaggggagagtgt

SEQ ID NO: 1980 - DNA, 660 bp, synthetic construct; identical to SEQ ID NO: 1979
  source 1..660: mol_type = other DNA

SEQ ID NO: 1981 - DNA, 660 bp, synthetic construct
  source 1..660: mol_type = other DNA
gacatcgtgatgacccagtctccagactccctgtctgtgtctctgggcgagagggccaccatcaactgcaagtccagccagagtgttttatccagctccaacaataagaactacttagcttggtaccaacagaaaccaggacagcctcctaacctgctcatttactggacttctacccgagaatccggggtccctgaccgattcagtggcagcgggtctgggacagatttcactctcaccatcaacagcctgcaggctgaagatgtggctgtttattactgtcagcaatattatcgtactccgtggacgttcggccaagggaccaaggtggaaatcaaacgaacggtggctgcaccatctgtcttcatcttcccgccatctgatgagcagttgaaatctggaactgcctctgttgtgtgcctgctgaataacttctatcccagagaggccaaagtacagtggaaggtggataacgccctccaatcgggtaactcccaggagagtgtcacagagcaggacagcaaggacagcacctacagcctcagcagcaccctgacgctgagcaaagcagactacgagaaacacaaagtctacgcctgcgaagtcacccatcagggcctgagctcgcccgtcacaaagagcttcaacaggggagagtgt

SEQ ID NO: 1982 - DNA, 660 bp, synthetic construct; identical to SEQ ID NO: 1981
  source 1..660: mol_type = other DNA

SEQ ID NO: 1983 - DNA, 660 bp, synthetic construct; identical to SEQ ID NO: 1891
  source 1..660: mol_type = other DNA

SEQ ID NO: 1984 - DNA, 660 bp, synthetic construct; identical to SEQ ID NO: 1981
  source 1..660: mol_type = other DNA

SEQ ID NO: 1985 - DNA, 660 bp, synthetic construct; identical to SEQ ID NO: 1981
  source 1..660: mol_type = other DNA

SEQ ID NO: 1986 - DNA, 660 bp, synthetic construct; identical to SEQ ID NO: 1891
  source 1..660: mol_type = other DNA

SEQ ID NO: 1987 - DNA, 660 bp, synthetic construct; identical to SEQ ID NO: 1891
  source 1..660: mol_type = other DNA

SEQ ID NO: 1988 - DNA, 660 bp, synthetic construct
  source 1..660: mol_type = other DNA
gacatcgtgatgacccagtctccagactccctggctgtgtctctgggcgagagggccaccatcaactgcaagtccagccagagtgttttatccagctccaacaataagaactacttagcttggtaccaacagaaaccaggacagcctcctaaactgctcatttactggacttctacccgagaatccggggtccctgaccgattcagtggcagcgggtctgggacagatttcactctcaccatcaacagcctgcaggctgaagatgtggctgtttattactgtcagcaatattatcgtactccgtggacgttcggccaagggaccaaggtggaaatcaaacgaacggtggctgcaccatctgtcttcatcttcccgccatctgatgagcagttgaaatctggaactgcctctgttgtgtgcctgctgaataacttctatcccagagaggccaaagtacagtggaaggtggataacgccctccaatcgggtaactcccaggagagtgtcacagagcaggacagcaaggacagcacctacagcctcagcagcaccctgacgctgagcaaagcagactacgagaaacacaaagtctacgcctgcgaagtcacccatcagggcctgagctcgcccgtcacaaagagcttcaacaggggagagtgt

SEQ ID NO: 1989 - DNA, 660 bp, synthetic construct; identical to SEQ ID NO: 1981
  source 1..660: mol_type = other DNA

SEQ ID NO: 1990 - DNA, 660 bp, synthetic construct; identical to SEQ ID NO: 1890
  source 1..660: mol_type = other DNA

SEQ ID NO: 1991 - DNA, 660 bp, synthetic construct; identical to SEQ ID NO: 1890
  source 1..660: mol_type = other DNA

SEQ ID NO: 1992 - DNA, 660 bp, synthetic construct; identical to SEQ ID NO: 1890
  source 1..660: mol_type = other DNA

SEQ ID NO: 1993 - DNA, 660 bp, synthetic construct; identical to SEQ ID NO: 1979
  source 1..660: mol_type = other DNA

SEQ ID NO: 1994 - DNA, 660 bp, synthetic construct; identical to SEQ ID NO: 1979
  source 1..660: mol_type = other DNA

SEQ ID NO: 1995 - DNA, 660 bp, synthetic construct; identical to SEQ ID NO: 1892
  source 1..660: mol_type = other DNA

SEQ ID NO: 1996 - DNA, 660 bp, synthetic construct; identical to SEQ ID NO: 1892
  source 1..660: mol_type = other DNA

SEQ ID NO: 1997 - DNA, 660 bp, synthetic construct; identical to SEQ ID NO: 1892
  source 1..660: mol_type = other DNA

SEQ ID NO: 1998 - DNA, 660 bp, synthetic construct; identical to SEQ ID NO: 1892
  source 1..660: mol_type = other DNA

SEQ ID NO: 1999 - DNA, 660 bp, synthetic construct; identical to SEQ ID NO: 1892
  source 1..660: mol_type = other DNA

SEQ ID NO: 2000 - DNA, 660 bp, synthetic construct; identical to SEQ ID NO: 1892
  source 1..660: mol_type = other DNA

SEQ ID NO: 2001 - DNA, 660 bp, synthetic construct; identical to SEQ ID NO: 1892
  source 1..660: mol_type = other DNA

SEQ ID NO: 2002 - DNA, 660 bp, synthetic construct
  source 1..660: mol_type = other DNA
gacatcgtgatgacccagtctccagactccctgtctgtgtctctgggcgagagggccaccatcaactgcaagtccagccagagtgttttatccagctccaacaataagaactacttagcttggtaccagcagaaaccaggacagcctcctaacctgctcatttactggacttctacccgagaatccggggtccctgaccgattcagtggcagcgggtctgggacagatttcactctcaccatcaacagcctgcaggctgaagatgtggctgtttattactgtcagcaatattatcgtactccgtggacgttcggccaagggaccaaggtggaaatcaaacgaacggtggctgcaccatctgtcttcatcttcccgccatctgatgagcagttgaaatctggaactgcctctgttgtgtgcctgctgaataacttctatcccagagaggccaaagtacagtggaaggtggataacgccctccaatcgggtaactcccaggagagtgtcacagagcaggacagcaaggacagcacctacagcctcagcagcaccctgacgctgagcaaagcagactacgagaaacacaaagtctacgcctgcgaagtcacccatcagggcctgagctcgcccgtcacaaagagcttcaacaggggagagtgt

SEQ ID NO: 2003 - DNA, 660 bp, synthetic construct; identical to SEQ ID NO: 2002
  source 1..660: mol_type = other DNA

SEQ ID NO: 2004 - DNA, 660 bp, synthetic construct; identical to SEQ ID NO: 2002
  source 1..660: mol_type = other DNA

SEQ ID NO: 2005 - DNA, 660 bp, synthetic construct; identical to SEQ ID NO: 2002
  source 1..660: mol_type = other DNA

SEQ ID NO: 2006 - DNA, 660 bp, synthetic construct
  source 1..660: mol_type = other DNA
gacatcgtgatgacccagtctccagactccctggctgtgtctctgggcgagagggccaccatcaactgcaagtccagccagagtgttttatccagctccaacaataagaactacttagcttggtaccagcagaaaccaggacagcctcctaaactgctcatttactggacttctacccgagattccggggtccctgaccgattcagtggcagcgggtctgggacagatttcactctcaccatcaacagcctgcaggctgaagatgtggctgtttattactgtcagcaatattatcgtactccgtggacgttcggccaagggaccaaggtggaaatcaaacgaacggtggctgcaccatctgtcttcatcttcccgccatctgatgagcagttgaaatctggaactgcctctgttgtgtgcctgctgaataacttctatcccagagaggccaaagtacagtggaaggtggataacgccctccaatcgggtaactcccaggagagtgtcacagagcaggacagcaaggacagcacctacagcctcagcagcaccctgacgctgagcaaagcagactacgagaaacacaaagtctacgcctgcgaagtcacccatcagggcctgagctcgcccgtcacaaagagcttcaacaggggagagtgt

SEQ ID NO: 2007 - DNA, 660 bp, synthetic construct
  source 1..660: mol_type = other DNA
gacatcgtgatgacccagtctccagactccctggctgtgtctctgggcgagagggccaccatcaactgcaagtccagccagagtgttttatccagctccaacaataagaactacttagcttggtaccagcagaaaccaggacagcctcctaaactgctcatttactggacttctacccgagaatccggggtccctgaccgattcagtggcagcgggtctgggacagatttcactctcaccatcaacagcctgcaggctgaagatgtggctgtttattactgtcagcaatattatcgtactccgtggacgttcggccaagggaccaaggtggaaatcaaacgaacggtggctgcaccatctgtcttcatcttcccgccatctgatgagcagttgaaatctggaactgcctctgttgtgtgcctgctgaataacttctatcccagagaggccaaagtacagtggaaggtggataacgccctccaatcgggtaactcccaggagagtgtcacagagcaggacagcaaggacagcacctacagcctcagcagcaccctgacgctgagcaaagcagactacgagaaacacaaagtctacgcctgcgaagtcacccatcagggcctgagctcgcccgtcacaaagagcttcaacaggggagagtgt

SEQ ID NO: 2008 - DNA, 648 bp, synthetic construct
  source 1..648: mol_type = other DNA
cagtctgtgctgactcagccaccctcagcgtctgggacccccgggcagagggtcaccatctcttgttctggaagtagctccaacatcggaagtcaaactgtaaactggtaccagcacctcccaggaacggcccccaaactcctcatctatactaataatcagcggccctcaggggtccctgaccgattctctggctccaagtctggcacctcagcctcccttgccatcagtgggctccagtctgaggatgaggctgattatttctgtgcaacattcgatgaaagcctgagtggtccggtattcggcggagggaccaagctgaccgtcctaggtcagcccaaggctgccccctcggtcactctgttcccgccctcctctgaggagcttcaagccaacaaggccacactggtgtgtctcataagtgacttctacccgggagccgtgacagtggcctggaaggcagatagcagccccgtcaaggcgggagtggagaccaccacaccctccaaacaaagcaacaacaagtacgcggccagcagctatctgagcctgacgcctgagcagtggaagtcccacagaagctacagctgccaggtcacgcatgaagggagcaccgtggagaagacagtggcccctacagaatgttca

SEQ ID NO: 2009 - DNA, 648 bp, synthetic construct
  source 1..648: mol_type = other DNA
cagtctgtgctgactcagccaccctcagcgtctgggacccccgggcagagggtcaccatctcttgttctggaagtagctccaacatcggaagtcaaactgtaaactggtaccagcacctcccaggaacggcccccaaactcctcatctatactaataatcagcggccctcaggggtccctgaccgattctctggctccaagtctggcacctcagcctcccttgccatcagtgggctccagtctgaggatgaggctgattatttctgtgcaacattcgatgaaagcctgcaaggtccggtattcggcggagggaccaagctgaccgtcctaggtcagcccaaggctgccccctcggtcactctgttcccgccctcctctgaggagcttcaagccaacaaggccacactggtgtgtctcataagtgacttctacccgggagccgtgacagtggcctggaaggcagatagcagccccgtcaaggcgggagtggagaccaccacaccctccaaacaaagcaacaacaagtacgcggccagcagctatctgagcctgacgcctgagcagtggaagtcccacagaagctacagctgccaggtcacgcatgaagggagcaccgtggagaagacagtggcccctacagaatgttca

SEQ ID NO: 2010 - DNA, 648 bp, synthetic construct
  source 1..648: mol_type = other DNA
cagtctgtgctgactcagccaccctcagcgtctgggacccccgggcagagggtcaccatctcttgttctggaagtagctccaacatcggaagtaattatgtaaactggtaccagcacctcccaggaacggcccccaaactcctcatctatactaataatcagcggccctcaggggtccctgaccgattctctggctccaagtctggcacctcagcctcccttgccatcagtgggctccagtctgaggatgaggctgattatttctgtgcaacattcgatgaaagcctgagtggtccggtattcggcggagggaccaagctgaccgtcctaggtcagcccaaggctgccccctcggtcactctgttcccgccctcctctgaggagcttcaagccaacaaggccacactggtgtgtctcataagtgacttctacccgggagccgtgacagtggcctggaaggcagatagcagccccgtcaaggcgggagtggagaccaccacaccctccaaacaaagcaacaacaagtacgcggccagcagctatctgagcctgacgcctgagcagtggaagtcccacagaagctacagctgccaggtcacgcatgaagggagcaccgtggagaagacagtggcccctacagaatgttca

SEQ ID NO: 2011 - DNA, 648 bp, synthetic construct
  source 1..648: mol_type = other DNA
cagtctgtgctgactcagccaccctcagcgtctgggacccccgggcagagggtcaccatctcttgttctggaagtagctccaacatcggaagtaattatgtaaactggtaccagcacctcccaggaacggcccccaaactcctcatctatactaataatcagcggccctcaggggtccctgaccgattctctggctccaagtctggcacctcagcctcccttgccatcagtgggctccagtctgaggatgaggctgattatttctgtgcaacattcgatgaaagcctgcaaggtccggtattcggcggagggaccaagctgaccgtcctaggtcagcccaaggctgccccctcggtcactctgttcccgccctcctctgaggagcttcaagccaacaaggccacactggtgtgtctcataagtgacttctacccgggagccgtgacagtggcctggaaggcagatagcagccccgtcaaggcgggagtggagaccaccacaccctccaaacaaagcaacaacaagtacgcggccagcagctatctgagcctgacgcctgagcagtggaagtcccacagaagctacagctgccaggtcacgcatgaagggagcaccgtggagaagacagtggcccctacagaatgttca

SEQ ID NO: 2012 - DNA, 648 bp, synthetic construct
  source 1..648: mol_type = other DNA
cagtctgtgctgactcagccaccctcagcgtctgggacccccgggcagagggtcaccatctcttgttctggaagtagctccaacatcggaagtcaaactgtaaactggtaccagcacctcccaggaacggcccccaaactcctcatctatactaataatcagcggccctcaggggtccctgaccgattctctggctccaagtctggcacctcagcctcccttgccatcagtgggctccagtctgaggatgaggctgattatttctgtgcaacattcgatgacagcctgaatggtccggtattcggcggagggaccaagctgaccgtcctaggtcagcccaaggctgccccctcggtcactctgttcccgccctcctctgaggagcttcaagccaacaaggccacactggtgtgtctcataagtgacttctacccgggagccgtgacagtggcctggaaggcagatagcagccccgtcaaggcgggagtggagaccaccacaccctccaaacaaagcaacaacaagtacgcggccagcagctatctgagcctgacgcctgagcagtggaagtcccacagaagctacagctgccaggtcacgcatgaagggagcaccgtggagaagacagtggcccctacagaatgttca

SEQ ID NO: 2013 - DNA, 648 bp, synthetic construct
  source 1..648: mol_type = other DNA
cagtctgtgctgactcagccaccctcagcgtctgggacccccgggcagagggtcaccatctcttgttctggaagtagctccaacatcggaagtaattatgtaaactggtaccagcacctcccaggaacggcccccaaactcctcatctatactaataatcagcggccctcaggggtccctgaccgattctctggctccaagtctggcacctcagcctcccttgccatcagtgggctccagtctgaggatgaggctgattatttctgtgcaacattcgatgacagcctgaatggtccggtattcggcggagggaccaagctgaccgtcctaggtcagcccaaggctgccccctcggtcactctgttcccgccctcctctgaggagcttcaagccaacaaggccacactggtgtgtctcataagtgacttctacccgggagccgtgacagtggcctggaaggcagatagcagccccgtcaaggcgggagtggagaccaccacaccctccaaacaaagcaacaacaagtacgcggccagcagctatctgagcctgacgcctgagcagtggaagtcccacagaagctacagctgccaggtcacgcatgaagggagcaccgtggagaagacagtggcccctacagaatgttca

SEQ ID NO: 2014 - DNA, 648 bp, synthetic construct
  source 1..648: mol_type = other DNA
cagtctgtgctgactcagccaccctcagcgtctgggacccccgggcagagggtcaccatctcttgttctggaagtagctccaacatcggaagtaatactgtaaactggtaccagcacctcccaggaacggcccccaaactcctcatctatactaataatcagcggccctcaggggtccctgaccgattctctggctccaagtctggcacctcagcctcccttgccatcagtgggctccagtctgaggatgaggctgattatttctgtgcaacattcgatgaaagcctgaatggtccggtattcggcggagggaccaagctgaccgtcctaggtcagcccaaggctgccccctcggtcactctgttcccgccctcctctgaggagcttcaagccaacaaggccacactggtgtgtctcataagtgacttctacccgggagccgtgacagtggcctggaaggcagatagcagccccgtcaaggcgggagtggagaccaccacaccctccaaacaaagcaacaacaagtacgcggccagcagctatctgagcctgacgcctgagcagtggaagtcccacagaagctacagctgccaggtcacgcatgaagggagcaccgtggagaagacagtggcccctacagaatgttca

SEQ ID NO: 2015 - DNA, 648 bp, synthetic construct
  source 1..648: mol_type = other DNA
cagtctgtgctgactcagccaccctcagcgtctgggacccccgggcagagggtcaccatctcttgttctggaagtagctccaacatcggaagtaatactgtaaactggtaccagcacctcccaggaacggcccccaaactcctcatctatactaataatcagcggccctcaggggtccctgaccgattctctggctccaagtctggcacctcagcctcccttgccatcagtgggctccagtctgaggatgaggctgattatttctgtgcaacattcgatgacagcctgcaaggtccggtattcggcggagggaccaagctgaccgtcctaggtcagcccaaggctgccccctcggtcactctgttcccgccctcctctgaggagcttcaagccaacaaggccacactggtgtgtctcataagtgacttctacccgggagccgtgacagtggcctggaaggcagatagcagccccgtcaaggcgggagtggagaccaccacaccctccaaacaaagcaacaacaagtacgcggccagcagctatctgagcctgacgcctgagcagtggaagtcccacagaagctacagctgccaggtcacgcatgaagggagcaccgtggagaagacagtggcccctacagaatgttca

SEQ ID NO: 2016 - DNA, 648 bp, synthetic construct
  source 1..648: mol_type = other DNA
cagtctgtgctgactcagccaccctcagcgtctgggacccccgggcagagggtcaccatctcttgttctggaagtagctccaacatcggaagtaatactgtaaactggtaccagcacctcccaggaacggcccccaaactcctcatctatactaataatcagcggccctcaggggtccctgaccgattctctggctccaagtctggcacctcagcctcccttgccatcagtgggctccagtctgaggatgaggctgattatttctgtgcaacattcgatgacagcctgagtggtccggtattcggcggagggaccaagctgaccgtcctaggtcagcccaaggctgccccctcggtcactctgttcccgccctcctctgaggagcttcaagccaacaaggccacactggtgtgtctcataagtgacttctacccgggagccgtgacagtggcctggaaggcagatagcagccccgtcaaggcgggagtggagaccaccacaccctccaaacaaagcaacaacaagtacgcggccagcagctatctgagcctgacgcctgagcagtggaagtcccacagaagctacagctgccaggtcacgcatgaagggagcaccgtggagaagacagtggcccctacagaatgttca

SEQ ID NO: 2017 - DNA, 648 bp, synthetic construct
  source 1..648: mol_type = other DNA
cagtctgtgctgactcagccaccctcagcgtctgggacccccgggcagagggtcaccatctcttgttctggaagtagctccaacatcggaagtaatactgtaaactggtaccagcacctcccaggaacggcccccaaactcctcatctatactaataatcagcggccctcaggggtccctgaccgattctctggctccaagtctggcacctcagcctcccttgccatcagtgggctccagtctgaggatgaggctgattatttctgtgcaacattcgatgacagcctgaatgctccggtattcggcggagggaccaagctgaccgtcctaggtcagcccaaggctgccccctcggtcactctgttcccgccctcctctgaggagcttcaagccaacaaggccacactggtgtgtctcataagtgacttctacccgggagccgtgacagtggcctggaaggcagatagcagccccgtcaaggcgggagtggagaccaccacaccctccaaacaaagcaacaacaagtacgcggccagcagctatctgagcctgacgcctgagcagtggaagtcccacagaagctacagctgccaggtcacgcatgaagggagcaccgtggagaagacagtggcccctacagaatgttca

SEQ ID NO: 2018 - DNA, 648 bp, synthetic construct
  source 1..648: mol_type = other DNA
cagtctgtgctgactcagccaccctcagcgtctgggacccccgggcagagggtcaccatctcttgttctggaagtagctccaacatcggaagtaatactgtaaactggtaccagcacctcccaggaacggcccccaaactcctcatctatactaataatcagcggccctcaggggtccctgaccgattctctggctccaagtctggcacctcagcctcccttgccatcagtgggctccagtctgaggatgaggctgattatttctgtgcaacattcgatagcagcctgaatggtccggtattcggcggagggaccaagctgaccgtcctaggtcagcccaaggctgccccctcggtcactctgttcccgccctcctctgaggagcttcaagccaacaaggccacactggtgtgtctcataagtgacttctacccgggagccgtgacagtggcctggaaggcagatagcagccccgtcaaggcgggagtggagaccaccacaccctccaaacaaagcaacaacaagtacgcggccagcagctatctgagcctgacgcctgagcagtggaagtcccacagaagctacagctgccaggtcacgcatgaagggagcaccgtggagaagacagtggcccctacagaatgttca

SEQ ID NO: 2019 - DNA, 648 bp, synthetic construct
  source 1..648: mol_type = other DNA
cagtctgtgctgactcagccaccctcagcgtctgggacccccgggcagagggtcaccatctcttgttctggaagtagctccaacatcggaagtaattatgtaaactggtaccagcacctcccaggaacggcccccaaactcctcatctatactaataatcagcggccctcaggggtccctgaccgattctctggctccaagtctggcacctcagcctcccttgccatcagtgggctccagtctgaggatgaggctgattatttctgtgcaacattcgatagcagcctgaatgctccggtattcggcggagggaccaagctgaccgtcctaggtcagcccaaggctgccccctcggtcactctgttcccgccctcctctgaggagcttcaagccaacaaggccacactggtgtgtctcataagtgacttctacccgggagccgtgacagtggcctggaaggcagatagcagccccgtcaaggcgggagtggagaccaccacaccctccaaacaaagcaacaacaagtacgcggccagcagctatctgagcctgacgcctgagcagtggaagtcccacagaagctacagctgccaggtcacgcatgaagggagcaccgtggagaagacagtggcccctacagaatgttca

SEQ ID NO: 2020 - DNA, 648 bp, synthetic construct; identical to SEQ ID NO: 2019
  source 1..648: mol_type = other DNA

SEQ ID NO: 2021 - DNA, 648 bp, synthetic construct; identical to SEQ ID NO: 2008
  source 1..648: mol_type = other DNA

SEQ ID NO: 2022 - DNA, 642 bp, synthetic construct
  source 1..642: mol_type = other DNA
gacatccagatgacccagtctccatcctccctgtctgcatctataggagacagagtcaccatcacttgccgggcaagtcaggaccttagaaattatttaggctggtatcaacagaaaccagggaaagcccctaagcgcctgatctatggtgcatccagtttgcaaagtggggtcccttcaaggttcagcggcagtggatctgggacagaattcactctcacaatcagcagcctgcagcctgaagatttcgcaacttattactgtctacagcataataattaccccttcactttcggccaagggaccaaagtggatatcaaacgaacggtggctgcaccatctgtcttcatcttcccgccatctgatgagcagttgaaatctggaactgcctctgttgtgtgcctgctgaataacttctatcccagagaggccaaagtacagtggaaggtggataacgccctccaatcgggtaactcccaggagagtgtcacagagcaggacagcaaggacagcacctacagcctcagcagcaccctgacgctgagcaaagcagactacgagaaacacaaagtctacgcctgcgaagtcacccatcagggcctgagctcgcccgtcacaaagagcttcaacaggggagagtgt

SEQ ID NO: 2023 - DNA, 642 bp, synthetic construct; identical to SEQ ID NO: 1906
  source 1..642: mol_type = other DNA

SEQ ID NO: 2024 - DNA, 648 bp, synthetic construct
  source 1..648: mol_type = other DNA
cagtctgtgctgactcagccaccctcagcgtctgggacccccgggcagagggtcaccatctcttgttctggaagtagctccaacatcggaagtaatactgtaaactggtaccagcaactcccaggaacggcccccaaactcctcatctatactaataatcagcggccctcaggggtccctgaccgattctctggctccaagtctggcacctcagcctcccttgccatcagtgggctccagtctgaggatgaggctgattatttctgtgcaacattcgatagcagcctgagtggtccggtattcggcggagggaccaagctgaccgtcctaggtcagcccaaggctgccccctcggtcactctgttcccgccctcctctgaggagcttcaagccaacaaggccacactggtgtgtctcataagtgacttctacccgggagccgtgacagtggcctggaaggcagatagcagccccgtcaaggcgggagtggagaccaccacaccctccaaacaaagcaacaacaagtacgcggccagcagctatctgagcctgacgcctgagcagtggaagtcccacagaagctacagctgccaggtcacgcatgaagggagcaccgtggagaagacagtggcccctacagaatgttca

SEQ ID NO: 2025 - DNA, 642 bp, synthetic construct
  source 1..642: mol_type = other DNA
gacatccagctgacccagtctccatcctccctgtctgcatctgtaggagacagagtcactatcacttgccgggcaagtcagaccattagcaggtttttaaattggtatcagcagaaacctgggaaagcccctgagctcctgatctatgttgcatccagtttgcaaagtggggtcccatcaagattcagtggcagtggttctgggacagatttcactctcaccatcagcagtctgcaacctgaagattttgcaacttactactgtcaacagagttacagtaccctgatcagttttggccaggggaccaagctggagatcacacgaacggtggctgcaccatctgtcttcatcttcccgccatctgatgagcagttgaaatctggaactgcctctgttgtgtgcctgctgaataacttctatcccagagaggccaaagtacagtggaaggtggataacgccctccaatcgggtaactcccaggagagtgtcacagagcaggacagcaaggacagcacctacagcctcagcagcaccctgacgctgagcaaagcagactacgagaaacacaaagtctacgcctgcgaagtcacccatcagggcctgagctcgcccgtcacaaagagcttcaacaggggagagtgt

SEQ ID NO: 2026 - DNA, 648 bp, synthetic construct
  source 1..648: mol_type = other DNA
cagtctgtgttgacgcagccgccctcagtgtctgcggccccaggacagaaggtcaccatctcctgctctggaagcagctccaacattggaaataattatgtatcctggtatgagcagttcccaggaacagcccccaaactcctcatttatgacaataataagcgaccctcagggattcctgaccgattctctggctccaagtctggcacgtcagccaccctgggcatcaccggactccagactggggacgaggccgattattactgcggaacatgggatagcagcctgagtgctgtggtattcggcggagggaccaaactgaccgtcctaggtcagcccaaggctgccccctcggtcactctgttcccgccctcctctgaggagcttcaagccaacaaggccacactggtgtgtctcataagtgacttctacccgggagccgtgacagtggcctggaaggcagatagcagccccgtcaaggcgggagtggagaccaccacaccctccaaacaaagcaacaacaagtacgcggccagcagctatctgagcctgacgcctgagcagtggaagtcccacagaagctacagctgccaggtcacgcatgaagggagcaccgtggagaagacagtggcccctacagaatgttca

SEQ ID NO: 2027 - DNA, 642 bp, synthetic construct
  source 1..642: mol_type = other DNA
gacatccagctgacccagtctccatcctccctgtctgcatctgtaggagacagagtcactatcacttgccgggcaagtcagaccattagcaggtttttaaattggtatcagcagaaacctgggaaagcccctgagctcctgatctatgttgcatccagtttgcaaagtggggtcccatcaagattcagtggcagtggttctgggacagatttcactctcaccatcagcagtctgcaacctgaagattttgcaacttactactgtcaacagagttacagtaccctgatcagttttggccaggggaccaagctggagatcaaacgaacggtggctgcaccatctgtcttcatcttcccgccatctgatgagcagttgaaatctggaactgcctctgttgtgtgcctgctgaataacttctatcccagagaggccaaagtacagtggaaggtggataacgccctccaatcgggtaactcccaggagagtgtcacagagcaggacagcaaggacagcacctacagcctcagcagcaccctgacgctgagcaaagcagactacgagaaacacaaagtctacgcctgcgaagtcacccatcagggcctgagctcgcccgtcacaaagagcttcaacaggggagagtgt

SEQ ID NO: 2028 - DNA, 642 bp, synthetic construct; identical to SEQ ID NO: 2027
  source 1..642: mol_type = other DNA

SEQ ID NO: 2029 - DNA, 642 bp, synthetic construct; identical to SEQ ID NO: 2025
  source 1..642: mol_type = other DNA

SEQ ID NO: 2030 - DNA, 642 bp, synthetic construct
  source 1..642: mol_type = other DNA
gacatccagctgacccagtctccatcctccctgtctgcatctgtaggagacagagtcactatcacttgccgggcaagtcagaccattagcaggtttttaaattggtatcagcagaaacctgggaaagcccctaagctcctgatctatgttgcatccagtttgcaaagtggggtcccatcaagattcagtggcagtggttctgggacagatttcactctcaccatcagcagtctgcaacctgaagattttgcaacttactactgtcaacagagttacagtaccctgatcagttttggccaggggaccaagctggagatcaaacgaacggtggctgcaccatctgtcttcatcttcccgccatctgatgagcagttgaaatctggaactgcctctgttgtgtgcctgctgaataacttctatcccagagaggccaaagtacagtggaaggtggataacgccctccaatcgggtaactcccaggagagtgtcacagagcaggacagcaaggacagcacctacagcctcagcagcaccctgacgctgagcaaagcagactacgagaaacacaaagtctacgcctgcgaagtcacccatcagggcctgagctcgcccgtcacaaagagcttcaacaggggagagtgt

SEQ ID NO: 2031 - DNA, 642 bp, synthetic construct; identical to SEQ ID NO: 2027
  source 1..642: mol_type = other DNA

SEQ ID NO: 2032 - DNA, 642 bp, synthetic construct; identical to SEQ ID NO: 2027
  source 1..642: mol_type = other DNA

SEQ ID NO: 2033 - DNA, 648 bp, synthetic construct
  source 1..648: mol_type = other DNA
cagtctgtgttgacgcagccgccctcagtgtctgcggccccaggacagaaggtcaccatctcctgctctggaagcagctccaacattggaaataattatgtatcctggtatcagcagctcccaggaacagcccccaaactcctcatttatgacaataataagcgaccctcagggattcctgaccgattctctggctccaagtctggcacgtcagccaccctgggcatcaccggactccagactggggacgaggccgattattactgcggaacatgggatagcagcctgagtgctgtggtattcggcggagggaccaaactgaccgtcctaggtcagcccaaggctgccccctcggtcactctgttcccgccctcctctgaggagcttcaagccaacaaggccacactggtgtgtctcataagtgacttctacccgggagccgtgacagtggcctggaaggcagatagcagccccgtcaaggcgggagtggagaccaccacaccctccaaacaaagcaacaacaagtacgcggccagcagctatctgagcctgacgcctgagcagtggaagtcccacagaagctacagctgccaggtcacgcatgaagggagcaccgtggagaagacagtggcccctacagaatgttca

SEQ ID NO: 2034 - DNA, 648 bp, synthetic construct; identical to SEQ ID NO: 2033
  source 1..648: mol_type = other DNA

SEQ ID NO: 2035 - DNA, 648 bp, synthetic construct; identical to SEQ ID NO: 2026
  source 1..648: mol_type = other DNA

SEQ ID NO: 2036 - DNA, 648 bp, synthetic construct
  source 1..648: mol_type = other DNA
cagtctgtgttgacgcagccgccctcagtgtctgcggccccaggacagaaggtcaccatctcctgctctggaagcagctccaacattggaaataattatgtatcctggtatcagcagctcccaggaacagcccccaaactcctcatttatgacaataataagcgaccctcagggattcctgaccgattctctggctccaagtctggcacgtcagccaccctggccatcaccggactccagactggggacgaggccgattattactgcggaacattcgaaagcagcctgagtgctgtggtattcggcggagggaccaaactgaccgtcctaggtcagcccaaggctgccccctcggtcactctgttcccgccctcctctgaggagcttcaagccaacaaggccacactggtgtgtctcataagtgacttctacccgggagccgtgacagtggcctggaaggcagatagcagccccgtcaaggcgggagtggagaccaccacaccctccaaacaaagcaacaacaagtacgcggccagcagctatctgagcctgacgcctgagcagtggaagtcccacagaagctacagctgccaggtcacgcatgaagggagcaccgtggagaagacagtggcccctacagaatgttca

SEQ ID NO: 2037 - DNA, 648 bp, synthetic construct
  source 1..648: mol_type = other DNA
cagtctgtgttgacgcagccgccctcagtgtctgcggccccaggacagaaggtcaccatctcctgctctggaagcagctccaacattggaaataattatgtatcctggtatcagcagctcccaggaacagcccccaaactcctcatttatgacaataataagcgaccctcagggattcctgaccgattctctggctccaagtctggcacgtcagccaccctggccatcaccggactccagactggggacgaggccgattattactgcggaacatgggatagcagcctgagtgctgtggtattcggcggagggaccaaactgaccgtcctaggtcagcccaaggctgccccctcggtcactctgttcccgccctcctctgaggagcttcaagccaacaaggccacactggtgtgtctcataagtgacttctacccgggagccgtgacagtggcctggaaggcagatagcagccccgtcaaggcgggagtggagaccaccacaccctccaaacaaagcaacaacaagtacgcggccagcagctatctgagcctgacgcctgagcagtggaagtcccacagaagctacagctgccaggtcacgcatgaagggagcaccgtggagaagacagtggcccctacagaatgttca

SEQ ID NO: 2038 - DNA, 648 bp, synthetic construct; identical to SEQ ID NO: 2037
  source 1..648: mol_type = other DNA

SEQ ID NO: 2039 - DNA, 648 bp, synthetic construct; identical to SEQ ID NO: 2033
  source 1..648: mol_type = other DNA

SEQ ID NO: 2040 - DNA, 648 bp, synthetic construct; identical to SEQ ID NO: 2036
  source 1..648: mol_type = other DNA

SEQ ID NO: 2041 - DNA, 642 bp, synthetic construct
  source 1..642: mol_type = other DNA
gacatccagctgacccagtctccatcctccctgtctgcatctgtaggagacagagtcactatcacttgccgggcaagtcagaccattagcaggtttttaaattggtatcagcagaaacctgggaaagcccctaagctcctgatctatgttgcatccagtttgcaaagtggggtcccatcaagattcagtggcagtggttctgggacagatttcactctcaccatcagcagtctgcaacctgaagattttgcaacttactactgtcaacagagttacagtaccctgctcagttttggccaggggaccaagctggagatcaaacgaacggtggctgcaccatctgtcttcatcttcccgccatctgatgagcagttgaaatctggaactgcctctgttgtgtgcctgctgaataacttctatcccagagaggccaaagtacagtggaaggtggataacgccctccaatcgggtaactcccaggagagtgtcacagagcaggacagcaaggacagcacctacagcctcagcagcaccctgacgctgagcaaagcagactacgagaaacacaaagtctacgcctgcgaagtcacccatcagggcctgagctcgcccgtcacaaagagcttcaacaggggagagtgt

SEQ ID NO: 2042 - DNA, 1374 bp, synthetic construct
  source 1..1374: mol_type = other DNA
cagatgcaggtggtgcagtctggggctgaggtgaagaagcctggggcctcagtgaaggtctcctgcaaggcttccggatacaccttcaccggctactatatgcattgggtgcgacaggcccctggacaagggcttgagtggatgggatggatcaaccctaacagtggtggcacaaactatgcacagaagtttcagggcagggtcaccatgaccagggacacgtccatcagtacagcctacatggagctgagcaggctgaggtctgacgacacggccgtgtattactgtgcgagagggggggattacgtttgggggacttatcggcctcactactactacggtatggacgtctggggccaagggaccacggtcaccgtctcctcagcctccaccaagggcccatcggtcttccccctggcaccctcctccaagagcacctctgggggcacagcggccctgggctgcctggtcaaggactacttccccgaaccggtgacggtgtcgtggaactcaggcgccctgaccagcggcgtgcacaccttcccggctgtcctacagtcctcaggactctactccctcagcagcgtggtgaccgtgccctccagcagcttgggcacccagacctacatctgcaacgtgaatcacaagcccagcaacaccaaggtggacaagaaagttgagcccaaatcttgtgacaaaactcacacatgcccaccgtgcccagcacctgaactcctggggggaccgtcagtcttcctcttccccccaaaacccaaggacaccctcatgatctcccggacccctgaggtcacatgcgtggtggtggacgtgagccacgaagaccctgaggtcaagttcaactggtacgtggacggcgtggaggtgcataatgccaagacaaagccgtgtgaggagcagtacggcagcacgtaccgttgtgtcagcgtcctcaccgtcctgcaccaggactggctgaatggcaaggagtacaagtgcaaggtctccaacaaagccctcccagcccccatcgagaaaaccatctccaaagccaaagggcagccccgagaaccacaggtgtacaccctgcccccatcccgggaggagatgaccaagaaccaggtcagcctgacctgcctggtcaaaggcttctatcccagcgacatcgccgtggagtgggagagcaatgggcagccggagaacaactacaagaccacgcctcccgtgctggactccgacggctccttcttcctctatagcaagctcaccgtggacaagagcaggtggcagcaggggaacgtcttctcatgctccgtgatgcatgaggctctgcacaaccactacacgcagaagagcctctccctgtctccgggtaaa

SEQ ID NO: 2043 - DNA, 1353 bp, synthetic construct
  source 1..1353: mol_type = other DNA
caggtgcagctggtggagtctgggggaggcgtggtccagcctgggaggtccctgagactctcctgtgcagcgtctggattcactttcagtaactttggcatgcactgggtccgccaggctccaggcaaggggctggagtgggtggcagttatatggtatgatggaagtaatgaaaactatgcagactccgtgaagggccgattcaccatctccagagacaattccaagaatacgctgtatctgcacatgaacagcctgagagtcgcggacacggctgtgtattattgtgcgcgagatgggacgatctttggagtggtcttgggggactactggggccagggaaccctggtcaccgtctcctcagcctccaccaagggcccatcggtcttccccctggcaccctcctccaagagcacctctgggggcacagcggccctgggctgcctggtcaaggactacttccccgaaccggtgacggtgtcgtggaactcaggcgccctgaccagcggcgtgcacaccttcccggctgtcctacagtcctcaggactctactccctcagcagcgtggtgaccgtgccctccagcagcttgggcacccagacctacatctgcaacgtgaatcacaagcccagcaacaccaaggtggacaagaaagttgagcccaaatcttgtgacaaaactcacacatgcccaccgtgcccagcacctgaactcctggggggaccgtcagtcttcctcttccccccaaaacccaaggacaccctcatgatctcccggacccctgaggtcacatgcgtggtggtggacgtgagccacgaagaccctgaggtcaagttcaactggtacgtggacggcgtggaggtgcataatgccaagacaaagccgtgtgaggagcagtacggcagcacgtaccgttgtgtcagcgtcctcaccgtcctgcaccaggactggctgaatggcaaggagtacaagtgcaaggtctccaacaaagccctcccagcccccatcgagaaaaccatctccaaagccaaagggcagccccgagaaccacaggtgtacaccctgcccccatcccgggaggagatgaccaagaaccaggtcagcctgacctgcctggtcaaaggcttctatcccagcgacatcgccgtggagtgggagagcaatgggcagccggagaacaactacaagaccacgcctcccgtgctggactccgacggctccttcttcctctatagcaagctcaccgtggacaagagcaggtggcagcaggggaacgtcttctcatgctccgtgatgcatgaggctctgcacaaccactacacgcagaagagcctctccctgtctccgggtaaa

SEQ ID NO: 2044 - DNA, 1353 bp, synthetic construct
  source 1..1353: mol_type = other DNA
caggtgcagctggtggagtctgggggaggcgtggtccagcctgggaggtccctgagactctcctgtgcagcgtctggattcaccttcagttactttggcatgcactgggtccgccaggctccaggcaaggggctggagtgggtggcagttatatggtatgatggaagtaataaatactatgcagactccgtgaagggccgcttcaccatctccagagacaattccaagaacacgctgtatctgcaaatgaacagcctgagagccgaggacacggctgtgtattactgtgcgcgagatgggacgatttttggagtgctcttgggggactactggggccagggaaccctggtcaccgtctcctcagcctccaccaagggcccatcggtcttccccctggcaccctcctccaagagcacctctgggggcacagcggccctgggctgcctggtcaaggactacttccccgaaccggtgacggtgtcgtggaactcaggcgccctgaccagcggcgtgcacaccttcccggctgtcctacagtcctcaggactctactccctcagcagcgtggtgaccgtgccctccagcagcttgggcacccagacctacatctgcaacgtgaatcacaagcccagcaacaccaaggtggacaagaaagttgagcccaaatcttgtgacaaaactcacacatgcccaccgtgcccagcacctgaactcctggggggaccgtcagtcttcctcttccccccaaaacccaaggacaccctcatgatctcccggacccctgaggtcacatgcgtggtggtggacgtgagccacgaagaccctgaggtcaagttcaactggtacgtggacggcgtggaggtgcataatgccaagacaaagccgtgtgaggagcagtacggcagcacgtaccgttgtgtcagcgtcctcaccgtcctgcaccaggactggctgaatggcaaggagtacaagtgcaaggtctccaacaaagccctcccagcccccatcgagaaaaccatctccaaagccaaagggcagccccgagaaccacaggtgtacaccctgcccccatcccgggaggagatgaccaagaaccaggtcagcctgacctgcctggtcaaaggcttctatcccagcgacatcgccgtggagtgggagagcaatgggcagccggagaacaactacaagaccacgcctcccgtgctggactccgacggctccttcttcctctatagcaagctcaccgtggacaagagcaggtggcagcaggggaacgtcttctcatgctccgtgatgcatgaggctctgcacaaccactacacgcagaagagcctctccctgtctccgggtaaa

SEQ ID NO: 2045 - DNA, 1350 bp, synthetic construct
  source 1..1350: mol_type = other DNA
caggtgcaactggtggagtctgggggaggcgtggtccagcctgggaggtccctgagactctcctgtgcagcgtctggattcaccttcagtagctatggcatgcactgggtccgccaggctccaggcaaggggctggagtgggtggcagttatatggtatgatggaagtaataaatactatgcagactccgtgaagggccgattcaccatctccagcgacaattccaagaacacgctgtatctgcaaatgaacagcctgagagccgaggacacggctgtgtattactgtgcgagagataggacgatttttggagtggttcttgactactggggccagggaaccctggtcaccgtctcctcagcctccaccaagggcccatcggtcttccccctggcaccctcctccaagagcacctctgggggcacagcggccctgggctgcctggtcaaggactacttccccgaaccggtgacggtgtcgtggaactcaggcgccctgaccagcggcgtgcacaccttcccggctgtcctacagtcctcaggactctactccctcagcagcgtggtgaccgtgccctccagcagcttgggcacccagacctacatctgcaacgtgaatcacaagcccagcaacaccaaggtggacaagaaagttgagcccaaatcttgtgacaaaactcacacatgcccaccgtgcccagcacctgaactcctggggggaccgtcagtcttcctcttccccccaaaacccaaggacaccctcatgatctcccggacccctgaggtcacatgcgtggtggtggacgtgagccacgaagaccctgaggtcaagttcaactggtacgtggacggcgtggaggtgcataatgccaagacaaagccgtgtgaggagcagtacggcagcacgtaccgttgtgtcagcgtcctcaccgtcctgcaccaggactggctgaatggcaaggagtacaagtgcaaggtctccaacaaagccctcccagcccccatcgagaaaaccatctccaaagccaaagggcagccccgagaaccacaggtgtacaccctgcccccatcccgggaggagatgaccaagaaccaggtcagcctgacctgcctggtcaaaggcttctatcccagcgacatcgccgtggagtgggagagcaatgggcagccggagaacaactacaagaccacgcctcccgtgctggactccgacggctccttcttcctctatagcaagctcaccgtggacaagagcaggtggcagcaggggaacgtcttctcatgctccgtgatgcatgaggctctgcacaaccactacacgcagaagagcctctccctgtctccgggtaaa

SEQ ID NO: 2046 - DNA, 1359 bp, synthetic construct
  source 1..1359: mol_type = other DNA
caggtgccgctggtgcagtctggggctgaggtgaagaagcctggggcctcagtgaaggtctcctgcaaggcttctggatacaccttcaccggctactatatccactgggtgcgacaggcccctggacaagggcttgagtggatggggtggatcaaccctgacagtggtggcacagactattcacagaggtttcagggcaggttcaccatgaccagggacacgtccatcagcacagcctacatggaactgaacaggctgagatctgacgacacggccgtgtattactgtgcgagagaggccacgatttttggaatggttattgtaccgtttgactactggggccagggaaccctggtcaccgtctcctcagcctccaccaagggcccatcggtcttccccctggcaccctcctccaagagcacctctgggggcacagcggccctgggctgcctggtcaaggactacttccccgaaccggtgacggtgtcgtggaactcaggcgccctgaccagcggcgtgcacaccttcccggctgtcctacagtcctcaggactctactccctcagcagcgtggtgaccgtgccctccagcagcttgggcacccagacctacatctgcaacgtgaatcacaagcccagcaacaccaaggtggacaagaaagttgagcccaaatcttgtgacaaaactcacacatgcccaccgtgcccagcacctgaactcctggggggaccgtcagtcttcctcttccccccaaaacccaaggacaccctcatgatctcccggacccctgaggtcacatgcgtggtggtggacgtgagccacgaagaccctgaggtcaagttcaactggtacgtggacggcgtggaggtgcataatgccaagacaaagccgtgtgaggagcagtacggcagcacgtaccgttgtgtcagcgtcctcaccgtcctgcaccaggactggctgaatggcaaggagtacaagtgcaaggtctccaacaaagccctcccagcccccatcgagaaaaccatctccaaagccaaagggcagccccgagaaccacaggtgtacaccctgcccccatcccgggaggagatgaccaagaaccaggtcagcctgacctgcctggtcaaaggcttctatcccagcgacatcgccgtggagtgggagagcaatgggcagccggagaacaactacaagaccacgcctcccgtgctggactccgacggctccttcttcctctatagcaagctcaccgtggacaagagcaggtggcagcaggggaacgtcttctcatgctccgtgatgcatgaggctctgcacaaccactacacgcagaagagcctctccctgtctccgggtaaa

SEQ ID NO: 2047 - DNA, 1359 bp, synthetic construct
  source 1..1359: mol_type = other DNA
caggtgccgctggtgcagtctggggctgaggtgaagaagcctggggcctcagtgaaggtctcctgcaaggcttctggatacaccttcaccggctactatatccactgggtgcgacaggcccctggacaaggacttgagtggatggggtggatcaaccctgacagtggtggcacagactattcacagaggtttcagggcaggttcaccatgaccagggacacgtccatcagcacagcctacatggaactgagcaggctgagatctgacgacacggccgtgtattactgtgcgagagaggccacgatttttggaatggttattgtaccgtttgactactggggccagggaaccctggtcaccgtctcctcagcctccaccaagggcccatcggtcttccccctggcaccctcctccaagagcacctctgggggcacagcggccctgggctgcctggtcaaggactacttccccgaaccggtgacggtgtcgtggaactcaggcgccctgaccagcggcgtgcacaccttcccggctgtcctacagtcctcaggactctactccctcagcagcgtggtgaccgtgccctccagcagcttgggcacccagacctacatctgcaacgtgaatcacaagcccagcaacaccaaggtggacaagaaagttgagcccaaatcttgtgacaaaactcacacatgcccaccgtgcccagcacctgaactcctggggggaccgtcagtcttcctcttccccccaaaacccaaggacaccctcatgatctcccggacccctgaggtcacatgcgtggtggtggacgtgagccacgaagaccctgaggtcaagttcaactggtacgtggacggcgtggaggtgcataatgccaagacaaagccgtgtgaggagcagtacggcagcacgtaccgttgtgtcagcgtcctcaccgtcctgcaccaggactggctgaatggcaaggagtacaagtgcaaggtctccaacaaagccctcccagcccccatcgagaaaaccatctccaaagccaaagggcagccccgagaaccacaggtgtacaccctgcccccatcccgggaggagatgaccaagaaccaggtcagcctgacctgcctggtcaaaggcttctatcccagcgacatcgccgtggagtgggagagcaatgggcagccggagaacaactacaagaccacgcctcccgtgctggactccgacggctccttcttcctctatagcaagctcaccgtggacaagagcaggtggcagcaggggaacgtcttctcatgctccgtgatgcatgaggctctgcacaaccactacacgcagaagagcctctccctgtctccgggtaaa

SEQ ID NO: 2048 - DNA, 1359 bp, synthetic construct
  source 1..1359: mol_type = other DNA
caggtgccgctggtacagtctggggctgaggtgaagaagcctggggcctcagtgaaggtctcctgcaaggcttctggatacaccttcaccggctactatatacactgggtgcgtcaggcccctggacaagggcttgtgtggatggggtggatcagccctaacagtggtgacacaagctatgcacagaagtttcaggacagggtcaccatgaccagggacacgtccatcagcacagcctatatggagctgagcagactgagatctgacgacacggccgtgtatttctgtacgagagaggccacgatttttggaatgcttattgtaccatttgactactggggccagggaaccctggtcaccgtctcctcagcctccaccaagggcccatcggtcttccccctggcaccctcctccaagagcacctctgggggcacagcggccctgggctgcctggtcaaggactacttccccgaaccggtgacggtgtcgtggaactcaggcgccctgaccagcggcgtgcacaccttcccggctgtcctacagtcctcaggactctactccctcagcagcgtggtgaccgtgccctccagcagcttgggcacccagacctacatctgcaacgtgaatcacaagcccagcaacaccaaggtggacaagaaagttgagcccaaatcttgtgacaaaactcacacatgcccaccgtgcccagcacctgaactcctggggggaccgtcagtcttcctcttccccccaaaacccaaggacaccctcatgatctcccggacccctgaggtcacatgcgtggtggtggacgtgagccacgaagaccctgaggtcaagttcaactggtacgtggacggcgtggaggtgcataatgccaagacaaagccgtgtgaggagcagtacggcagcacgtaccgttgtgtcagcgtcctcaccgtcctgcaccaggactggctgaatggcaaggagtacaagtgcaaggtctccaacaaagccctcccagcccccatcgagaaaaccatctccaaagccaaagggcagccccgagaaccacaggtgtacaccctgcccccatcccgggaggagatgaccaagaaccaggtcagcctgacctgcctggtcaaaggcttctatcccagcgacatcgccgtggagtgggagagcaatgggcagccggagaacaactacaagaccacgcctcccgtgctggactccgacggctccttcttcctctatagcaagctcaccgtggacaagagcaggtggcagcaggggaacgtcttctcatgctccgtgatgcatgaggctctgcacaaccactacacgcagaagagcctctccctgtctccgggtaaa

SEQ ID NO: 2049 - DNA, 1359 bp, synthetic construct
  source 1..1359: mol_type = other DNA
caggtgccgctggtgcagtctggggctgaggtgaagaagcctggggcctcagtgaaggtctcctgcaaggcttctggatacaccttcaccggctactatatacactgggtgcgtcaggcccctggacaagggcttgagtggatggggtggataagccctaacaatggtgacacaaactatgcacagaagtttcaggacagggtcaccatgaccagggacacgtccatcagcacagcctatatggagctgagcaggctgagatctgacgacacggccgtgtattactgtacgagagaggccacgatttttggaatgcttattgtaccatttgactactggggccagggaaccctggtcaccgtctcctcagcctccaccaagggcccatcggtcttccccctggcaccctcctccaagagcacctctgggggcacagcggccctgggctgcctggtcaaggactacttccccgaaccggtgacggtgtcgtggaactcaggcgccctgaccagcggcgtgcacaccttcccggctgtcctacagtcctcaggactctactccctcagcagcgtggtgaccgtgccctccagcagcttgggcacccagacctacatctgcaacgtgaatcacaagcccagcaacaccaaggtggacaagaaagttgagcccaaatcttgtgacaaaactcacacatgcccaccgtgcccagcacctgaactcctggggggaccgtcagtcttcctcttccccccaaaacccaaggacaccctcatgatctcccggacccctgaggtcacatgcgtggtggtggacgtgagccacgaagaccctgaggtcaagttcaactggtacgtggacggcgtggaggtgcataatgccaagacaaagccgtgtgaggagcagtacggcagcacgtaccgttgtgtcagcgtcctcaccgtcctgcaccaggactggctgaatggcaaggagtacaagtgcaaggtctccaacaaagccctcccagcccccatcgagaaaaccatctccaaagccaaagggcagccccgagaaccacaggtgtacaccctgcccccatcccgggaggagatgaccaagaaccaggtcagcctgacctgcctggtcaaaggcttctatcccagcgacatcgccgtggagtgggagagcaatgggcagccggagaacaactacaagaccacgcctcccgtgctggactccgacggctccttcttcctctatagcaagctcaccgtggacaagagcaggtggcagcaggggaacgtcttctcatgctccgtgatgcatgaggctctgcacaaccactacacgcagaagagcctctccctgtctccgggtaaa

SEQ ID NO: 2050 - DNA, 1368 bp, synthetic construct
  source 1..1368: mol_type = other DNA
caggtgcagttgcaggagtcgggcccaggactggtgaagccttcacagaccctgtccctcacctgcactgtctctggtgactccatcagcagtggtggttactactggagctggatccgccagcacccagggaagggcctggagtggattgggtacatctattacagtgggagcacctactacaacccgtccctcaagagtcgagttaccatatcagtagacacgtctaagaaccagttctccctgaagctgagctctgtgactgccgcggacacggccgtgtattactgtgcgagagatcgtattacgatttttggagtggttatggggggcggtatggacgtctggggccaagggaccacggtcaccgtctcctcagcctccaccaagggcccatcggtcttccccctggcaccctcctccaagagcacctctgggggcacagcggccctgggctgcctggtcaaggactacttccccgaaccggtgacggtgtcgtggaactcaggcgccctgaccagcggcgtgcacaccttcccggctgtcctacagtcctcaggactctactccctcagcagcgtggtgaccgtgccctccagcagcttgggcacccagacctacatctgcaacgtgaatcacaagcccagcaacaccaaggtggacaagaaagttgagcccaaatcttgtgacaaaactcacacatgcccaccgtgcccagcacctgaactcctggggggaccgtcagtcttcctcttccccccaaaacccaaggacaccctcatgatctcccggacccctgaggtcacatgcgtggtggtggacgtgagccacgaagaccctgaggtcaagttcaactggtacgtggacggcgtggaggtgcataatgccaagacaaagccgtgtgaggagcagtacggcagcacgtaccgttgtgtcagcgtcctcaccgtcctgcaccaggactggctgaatggcaaggagtacaagtgcaaggtctccaacaaagccctcccagcccccatcgagaaaaccatctccaaagccaaagggcagccccgagaaccacaggtgtacaccctgcccccatcccgggaggagatgaccaagaaccaggtcagcctgacctgcctggtcaaaggcttctatcccagcgacatcgccgtggagtgggagagcaatgggcagccggagaacaactacaagaccacgcctcccgtgctggactccgacggctccttcttcctctatagcaagctcaccgtggacaagagcaggtggcagcaggggaacgtcttctcatgctccgtgatgcatgaggctctgcacaaccactacacgcagaagagcctctccctgtctccgggtaaa

SEQ ID NO: 2051 - DNA, 1350 bp, synthetic construct
  source 1..1350: mol_type = other DNA
caggtgcagctggtggagtctgggggaggcgtggtccagcctgggaggtccctgagactctcctgtgcagcatctggattcaccttcagtaactatggcatgcactgggtccgccaggctccaggcgaggggctggagtgggtggcagctatatggtttgatggaagtgataaatactatgcagactccgtgaagggccgattcaccatctccagagacaactccaagaacacgctgtatctgcaaatgaacagcctgagagccgaggacacggctgtgtattactgtgcgagagatcaggcgatttttggagtggtccccgactactggggccagggaaccctggtcaccgtctcctcagcctccaccaagggcccatcggtcttccccctggcaccctcctccaagagcacctctgggggcacagcggccctgggctgcctggtcaaggactacttccccgaaccggtgacggtgtcgtggaactcaggcgccctgaccagcggcgtgcacaccttcccggctgtcctacagtcctcaggactctactccctcagcagcgtggtgaccgtgccctccagcagcttgggcacccagacctacatctgcaacgtgaatcacaagcccagcaacaccaaggtggacaagaaagttgagcccaaatcttgtgacaaaactcacacatgcccaccgtgcccagcacctgaactcctggggggaccgtcagtcttcctcttccccccaaaacccaaggacaccctcatgatctcccggacccctgaggtcacatgcgtggtggtggacgtgagccacgaagaccctgaggtcaagttcaactggtacgtggacggcgtggaggtgcataatgccaagacaaagccgtgtgaggagcagtacggcagcacgtaccgttgtgtcagcgtcctcaccgtcctgcaccaggactggctgaatggcaaggagtacaagtgcaaggtctccaacaaagccctcccagcccccatcgagaaaaccatctccaaagccaaagggcagccccgagaaccacaggtgtacaccctgcccccatcccgggaggagatgaccaagaaccaggtcagcctgacctgcctggtcaaaggcttctatcccagcgacatcgccgtggagtgggagagcaatgggcagccggagaacaactacaagaccacgcctcccgtgctggactccgacggctccttcttcctctatagcaagctcaccgtggacaagagcaggtggcagcaggggaacgtcttctcatgctccgtgatgcatgaggctctgcacaaccactacacgcagaagagcctctccctgtctccgggtaaa

SEQ ID NO: 2052 - DNA, 1353 bp, synthetic construct; identical to SEQ ID NO: 2044
  source 1..1353: mol_type = other DNA

SEQ ID NO: 2053 - DNA, 1350 bp, synthetic construct
  source 1..1350: mol_type = other DNA
caggtgcagctggtggagtctgggggaggcgtggtccagcctgggaggtccctgagactctcctgtgcagcgtctggattctccttcagtagctatggcatgcactgggtccgccagcctccaggcaaggggctggagtgggtggcagctatatggtatgatggaaataataaatactatgcagactccgtgaagggccgattcaccatctccagagacagttccaagaacacgctgtatctgcaaatgaacagcctgagagccgaggacacggctgtgtattactgtgcgagagatcggacgatttttggagtggtccttgagtacctcggccagggaaccctggtcaccgtctcctcagcctccaccaagggcccatcggtcttccccctggcaccctcctccaagagcacctctgggggcacagcggccctgggctgcctggtcaaggactacttccccgaaccggtgacggtgtcgtggaactcaggcgccctgaccagcggcgtgcacaccttcccggctgtcctacagtcctcaggactctactccctcagcagcgtggtgaccgtgccctccagcagcttgggcacccagacctacatctgcaacgtgaatcacaagcccagcaacaccaaggtggacaagaaagttgagcccaaatcttgtgacaaaactcacacatgcccaccgtgcccagcacctgaactcctggggggaccgtcagtcttcctcttccccccaaaacccaaggacaccctcatgatctcccggacccctgaggtcacatgcgtggtggtggacgtgagccacgaagaccctgaggtcaagttcaactggtacgtggacggcgtggaggtgcataatgccaagacaaagccgtgtgaggagcagtacggcagcacgtaccgttgtgtcagcgtcctcaccgtcctgcaccaggactggctgaatggcaaggagtacaagtgcaaggtctccaacaaagccctcccagcccccatcgagaaaaccatctccaaagccaaagggcagccccgagaaccacaggtgtacaccctgcccccatcccgggaggagatgaccaagaaccaggtcagcctgacctgcctggtcaaaggcttctatcccagcgacatcgccgtggagtgggagagcaatgggcagccggagaacaactacaagaccacgcctcccgtgctggactccgacggctccttcttcctctatagcaagctcaccgtggacaagagcaggtggcagcaggggaacgtcttctcatgctccgtgatgcatgaggctctgcacaaccactacacgcagaagagcctctccctgtctccgggtaaa

SEQ ID NO: 2054 - DNA, 1341 bp, synthetic construct
  source 1..1341: mol_type = other DNA
caggtgcagctgcaggagtcgggcccaggactggtgaagccttcggagaccctgtccctcacctgcactgtctctcagggctccatcagtagttactactggagctggatccggcagcccgccgggaagggactagagtggattggccgtatctataccagtgggagcaccaactacaacccctccctcaagagtcgagtcaccatgtcaatagacacgtccaagaaccagttctccctgaaactgaactctgtgaccgccgcggacacggccgtgtattactgtgcgagagatgtagcagtggctggctttgactactggggccagggaaccctggtcaccgtctcctcagcctccaccaagggcccatcggtcttccccctggcaccctcctccaagagcacctctgggggcacagcggccctgggctgcctggtcaaggactacttccccgaaccggtgacggtgtcgtggaactcaggcgccctgaccagcggcgtgcacaccttcccggctgtcctacagtcctcaggactctactccctcagcagcgtggtgaccgtgccctccagcagcttgggcacccagacctacatctgcaacgtgaatcacaagcccagcaacaccaaggtggacaagaaagttgagcccaaatcttgtgacaaaactcacacatgcccaccgtgcccagcacctgaactcctggggggaccgtcagtcttcctcttccccccaaaacccaaggacaccctcatgatctcccggacccctgaggtcacatgcgtggtggtggacgtgagccacgaagaccctgaggtcaagttcaactggtacgtggacggcgtggaggtgcataatgccaagacaaagccgtgtgaggagcagtacggcagcacgtaccgttgtgtcagcgtcctcaccgtcctgcaccaggactggctgaatggcaaggagtacaagtgcaaggtctccaacaaagccctcccagcccccatcgagaaaaccatctccaaagccaaagggcagccccgagaaccacaggtgtacaccctgcccccatcccgggaggagatgaccaagaaccaggtcagcctgacctgcctggtcaaaggcttctatcccagcgacatcgccgtggagtgggagagcaatgggcagccggagaacaactacaagaccacgcctcccgtgctggactccgacggctccttcttcctctatagcaagctcaccgtggacaagagcaggtggcagcaggggaacgtcttctcatgctccgtgatgcatgaggctctgcacaaccactacacgcagaagagcctctccctgtctccgggtaaa

SEQ ID NO: 2055 - DNA, 1341 bp, synthetic construct
  source 1..1341: mol_type = other DNA
caggtgcagctgcaggagtcgggcccaggactggtgaagccttcggagaccctgtccctcacctgcactgtctctgggggctccatcagtagttactactggagctggatccggcagcccgccgggaagggactagagtggattggccgtatctataccagtgggagcaccaactacaacccctccctcaagagtcgagtcaccatgtcaatagacacgtccaagaaccagttctccctgaaactgaactctgtgaccgccgcggacacggccgtgtattactgtgcgagagatgtagcagtggctggctttgactactggggccagggaaccctggtcaccgtctcctcagcctccaccaagggcccatcggtcttccccctggcaccctcctccaagagcacctctgggggcacagcggccctgggctgcctggtcaaggactacttccccgaaccggtgacggtgtcgtggaactcaggcgccctgaccagcggcgtgcacaccttcccggctgtcctacagtcctcaggactctactccctcagcagcgtggtgaccgtgccctccagcagcttgggcacccagacctacatctgcaacgtgaatcacaagcccagcaacaccaaggtggacaagaaagttgagcccaaatcttgtgacaaaactcacacatgcccaccgtgcccagcacctgaactcctggggggaccgtcagtcttcctcttccccccaaaacccaaggacaccctcatgatctcccggacccctgaggtcacatgcgtggtggtggacgtgagccacgaagaccctgaggtcaagttcaactggtacgtggacggcgtggaggtgcataatgccaagacaaagccgtgtgaggagcagtacggcagcacgtaccgttgtgtcagcgtcctcaccgtcctgcaccaggactggctgaatggcaaggagtacaagtgcaaggtctccaacaaagccctcccagcccccatcgagaaaaccatctccaaagccaaagggcagccccgagaaccacaggtgtacaccctgcccccatcccgggaggagatgaccaagaaccaggtcagcctgacctgcctggtcaaaggcttctatcccagcgacatcgccgtggagtgggagagcaatgggcagccggagaacaactacaagaccacgcctcccgtgctggactccgacggctccttcttcctctatagcaagctcaccgtggacaagagcaggtggcagcaggggaacgtcttctcatgctccgtgatgcatgaggctctgcacaaccactacacgcagaagagcctctccctgtctccgggtaaa

SEQ ID NO: 2056 - DNA, 1353 bp, synthetic construct
  source 1..1353: mol_type = other DNA
caggtgcagctggtggagtctgggggaggcgtggtccagcctgggaggtccctgagactctcctgtgcagcgtctggattcaccttcagttactttggcatgcactgggtccgccaggctccaggcaaggggctggagtgggtggcagttatatggtatgatgcaagtaataaatactatgcagacgccgtgaagggccgcttcaccatctccagagacaattccaagaacacgctgtatctgcaaatgaacagcctgagagccgaggacacggctgtgtattactgtgcgcgagatgggacgatttttggagtgctcttgggggactactggggccagggaaccctggtcaccgtctcctcagcctccaccaagggcccatcggtcttccccctggcaccctcctccaagagcacctctgggggcacagcggccctgggctgcctggtcaaggactacttccccgaaccggtgacggtgtcgtggaactcaggcgccctgaccagcggcgtgcacaccttcccggctgtcctacagtcctcaggactctactccctcagcagcgtggtgaccgtgccctccagcagcttgggcacccagacctacatctgcaacgtgaatcacaagcccagcaacaccaaggtggacaagaaagttgagcccaaatcttgtgacaaaactcacacatgcccaccgtgcccagcacctgaactcctggggggaccgtcagtcttcctcttccccccaaaacccaaggacaccctcatgatctcccggacccctgaggtcacatgcgtggtggtggacgtgagccacgaagaccctgaggtcaagttcaactggtacgtggacggcgtggaggtgcataatgccaagacaaagccgtgtgaggagcagtacggcagcacgtaccgttgtgtcagcgtcctcaccgtcctgcaccaggactggctgaatggcaaggagtacaagtgcaaggtctccaacaaagccctcccagcccccatcgagaaaaccatctccaaagccaaagggcagccccgagaaccacaggtgtacaccctgcccccatcccgggaggagatgaccaagaaccaggtcagcctgacctgcctggtcaaaggcttctatcccagcgacatcgccgtggagtgggagagcaatgggcagccggagaacaactacaagaccacgcctcccgtgctggactccgacggctccttcttcctctatagcaagctcaccgtggacaagagcaggtggcagcaggggaacgtcttctcatgctccgtgatgcatgaggctctgcacaaccactacacgcagaagagcctctccctgtctccgggtaaa

SEQ ID NO: 2057 - DNA, 1353 bp, synthetic construct
  source 1..1353: mol_type = other DNA
caggtgcagctggtggagtctgggggaggcgtggtccagcctgggaggtccctgagactctcctgtgcagcgtctggattcaccttcagttactttggcatgcactgggtccgccaggctccaggcaaggggctggagtgggtggcagttatatggtatgatgcaagtaataaatactatgcagactccgtgaagggccgcttcaccatctccagagacaattccaagaacacgctgtatctgcaaatgaacagcctgagagccgaggacacggctgtgtattactgtgcgcgagatgggacgatttttggagtgctcttgggggactactggggccagggaaccctggtcaccgtctcctcagcctccaccaagggcccatcggtcttccccctggcaccctcctccaagagcacctctgggggcacagcggccctgggctgcctggtcaaggactacttccccgaaccggtgacggtgtcgtggaactcaggcgccctgaccagcggcgtgcacaccttcccggctgtcctacagtcctcaggactctactccctcagcagcgtggtgaccgtgccctccagcagcttgggcacccagacctacatctgcaacgtgaatcacaagcccagcaacaccaaggtggacaagaaagttgagcccaaatcttgtgacaaaactcacacatgcccaccgtgcccagcacctgaactcctggggggaccgtcagtcttcctcttccccccaaaacccaaggacaccctcatgatctcccggacccctgaggtcacatgcgtggtggtggacgtgagccacgaagaccctgaggtcaagttcaactggtacgtggacggcgtggaggtgcataatgccaagacaaagccgtgtgaggagcagtacggcagcacgtaccgttgtgtcagcgtcctcaccgtcctgcaccaggactggctgaatggcaaggagtacaagtgcaaggtctccaacaaagccctcccagcccccatcgagaaaaccatctccaaagccaaagggcagccccgagaaccacaggtgtacaccctgcccccatcccgggaggagatgaccaagaaccaggtcagcctgacctgcctggtcaaaggcttctatcccagcgacatcgccgtggagtgggagagcaatgggcagccggagaacaactacaagaccacgcctcccgtgctggactccgacggctccttcttcctctatagcaagctcaccgtggacaagagcaggtggcagcaggggaacgtcttctcatgctccgtgatgcatgaggctctgcacaaccactacacgcagaagagcctctccctgtctccgggtaaa

SEQ ID NO: 2058 - DNA, 1353 bp, synthetic construct
  source 1..1353: mol_type = other DNA
caggtgcagctggtggagtctgggggaggcgtggtccagcctgggaggtccctgagactctcctgtgcagcgtctggattcaccttcagttactttggcatgcactgggtccgccaggctccaggcaaggggctggagtgggtggcagttatatggtatgatggaagtaataaatactatgcagacgccgtgaagggccgcttcaccatctccagagacaattccaagaacacgctgtatctgcaaatgaacagcctgagagccgaggacacggctgtgtattactgtgcgcgagatgggacgatttttggagtgctcttgggggactactggggccagggaaccctggtcaccgtctcctcagcctccaccaagggcccatcggtcttccccctggcaccctcctccaagagcacctctgggggcacagcggccctgggctgcctggtcaaggactacttccccgaaccggtgacggtgtcgtggaactcaggcgccctgaccagcggcgtgcacaccttcccggctgtcctacagtcctcaggactctactccctcagcagcgtggtgaccgtgccctccagcagcttgggcacccagacctacatctgcaacgtgaatcacaagcccagcaacaccaaggtggacaagaaagttgagcccaaatcttgtgacaaaactcacacatgcccaccgtgcccagcacctgaactcctggggggaccgtcagtcttcctcttccccccaaaacccaaggacaccctcatgatctcccggacccctgaggtcacatgcgtggtggtggacgtgagccacgaagaccctgaggtcaagttcaactggtacgtggacggcgtggaggtgcataatgccaagacaaagccgtgtgaggagcagtacggcagcacgtaccgttgtgtcagcgtcctcaccgtcctgcaccaggactggctgaatggcaaggagtacaagtgcaaggtctccaacaaagccctcccagcccccatcgagaaaaccatctccaaagccaaagggcagccccgagaaccacaggtgtacaccctgcccccatcccgggaggagatgaccaagaaccaggtcagcctgacctgcctggtcaaaggcttctatcccagcgacatcgccgtggagtgggagagcaatgggcagccggagaacaactacaagaccacgcctcccgtgctggactccgacggctccttcttcctctatagcaagctcaccgtggacaagagcaggtggcagcaggggaacgtcttctcatgctccgtgatgcatgaggctctgcacaaccactacacgcagaagagcctctccctgtctccgggtaaa

SEQ ID NO: 2059 - DNA, 1353 bp, synthetic construct; identical to SEQ ID NO: 2056
  source 1..1353: mol_type = other DNA

SEQ ID NO: 2060 - DNA, 1353 bp, synthetic construct; identical to SEQ ID NO: 2056
  source 1..1353: mol_type = other DNA

SEQ ID NO: 2061 - DNA, 1353 bp, synthetic construct
  source 1..1353: mol_type = other DNA
caggtgcagctggtggagtctgggggaggcgtggtccagcctgggaggtccctgagactctcctgtgcagcgtctggattcaccttcagttactttggcatgcactgggtccgccaggctccaggcaaggggctggagtgggtggcagttatatggtatgatgcaagtaataaatactatgcagacgccgtgaagggccgcttcaccatctccagagacaattccaagaacacgctgtatctgcaaatgaacagcctgagagccgaggacacggctgtgtattactgtgcgcgagataggacgatttttggagtgctcttgggggactactggggccagggaaccctggtcaccgtctcctcagcctccaccaagggcccatcggtcttccccctggcaccctcctccaagagcacctctgggggcacagcggccctgggctgcctggtcaaggactacttccccgaaccggtgacggtgtcgtggaactcaggcgccctgaccagcggcgtgcacaccttcccggctgtcctacagtcctcaggactctactccctcagcagcgtggtgaccgtgccctccagcagcttgggcacccagacctacatctgcaacgtgaatcacaagcccagcaacaccaaggtggacaagaaagttgagcccaaatcttgtgacaaaactcacacatgcccaccgtgcccagcacctgaactcctggggggaccgtcagtcttcctcttccccccaaaacccaaggacaccctcatgatctcccggacccctgaggtcacatgcgtggtggtggacgtgagccacgaagaccctgaggtcaagttcaactggtacgtggacggcgtggaggtgcataatgccaagacaaagccgtgtgaggagcagtacggcagcacgtaccgttgtgtcagcgtcctcaccgtcctgcaccaggactggctgaatggcaaggagtacaagtgcaaggtctccaacaaagccctcccagcccccatcgagaaaaccatctccaaagccaaagggcagccccgagaaccacaggtgtacaccctgcccccatcccgggaggagatgaccaagaaccaggtcagcctgacctgcctggtcaaaggcttctatcccagcgacatcgccgtggagtgggagagcaatgggcagccggagaacaactacaagaccacgcctcccgtgctggactccgacggctccttcttcctctatagcaagctcaccgtggacaagagcaggtggcagcaggggaacgtcttctcatgctccgtgatgcatgaggctctgcacaaccactacacgcagaagagcctctccctgtctccgggtaaa

SEQ ID NO: 2062 - DNA, 1353 bp, synthetic construct
  source 1..1353: mol_type = other DNA
caggtgcagctggtggagtctgggggaggcgtggtccagcctgggaggtccctgagactctcctgtgcagcgtctggattcactttcagtaactttggcatgcactgggtccgccaggctccaggcaaggggctggagtgggtggcagttatatggtatgatgcaagtaatgaaaactatgcagacgccgtgaagggccgattcaccatctccagagacaattccaagaatacgctgtatctgcaaatgaacagcctgagagtcgcggacacggctgtgtattattgtgcgcgagatgggacgatctttggagtggtcttgggggactactggggccagggaaccctggtcaccgtctcctcagcctccaccaagggcccatcggtcttccccctggcaccctcctccaagagcacctctgggggcacagcggccctgggctgcctggtcaaggactacttccccgaaccggtgacggtgtcgtggaactcaggcgccctgaccagcggcgtgcacaccttcccggctgtcctacagtcctcaggactctactccctcagcagcgtggtgaccgtgccctccagcagcttgggcacccagacctacatctgcaacgtgaatcacaagcccagcaacaccaaggtggacaagaaagttgagcccaaatcttgtgacaaaactcacacatgcccaccgtgcccagcacctgaactcctggggggaccgtcagtcttcctcttccccccaaaacccaaggacaccctcatgatctcccggacccctgaggtcacatgcgtggtggtggacgtgagccacgaagaccctgaggtcaagttcaactggtacgtggacggcgtggaggtgcataatgccaagacaaagccgtgtgaggagcagtacggcagcacgtaccgttgtgtcagcgtcctcaccgtcctgcaccaggactggctgaatggcaaggagtacaagtgcaaggtctccaacaaagccctcccagcccccatcgagaaaaccatctccaaagccaaagggcagccccgagaaccacaggtgtacaccctgcccccatcccgggaggagatgaccaagaaccaggtcagcctgacctgcctggtcaaaggcttctatcccagcgacatcgccgtggagtgggagagcaatgggcagccggagaacaactacaagaccacgcctcccgtgctggactccgacggctccttcttcctctatagcaagctcaccgtggacaagagcaggtggcagcaggggaacgtcttctcatgctccgtgatgcatgaggctctgcacaaccactacacgcagaagagcctctccctgtctccgggtaaa

SEQ ID NO: 2063 - DNA, 1353 bp, synthetic construct; identical to SEQ ID NO: 2062
  source 1..1353: mol_type = other DNA

SEQ ID NO: 2064 - DNA, 1353 bp, synthetic construct; identical to SEQ ID NO: 2062
  source 1..1353: mol_type = other DNA

SEQ ID NO: 2065 - DNA, 1353 bp, synthetic construct
  source 1..1353: mol_type = other DNA
caggtgcagctggtggagtctgggggaggcgtggtccagcctgggaggtccctgagactctcctgtgcagcgtctggattcactttcagtaactttggcatgcactgggtccgccaggctccaggcaaggggctggagtgggtggcagttatatggtatgatgcaagtaatgaaaactatgcagactccgtgaagggccgattcaccatctccagagacaattccaagaatacgctgtatctgcacatgaacagcctgagagtcgcggacacggctgtgtattattgtgcgcgagatgggacgatctttggagtggtcttgggggactactggggccagggaaccctggtcaccgtctcctcagcctccaccaagggcccatcggtcttccccctggcaccctcctccaagagcacctctgggggcacagcggccctgggctgcctggtcaaggactacttccccgaaccggtgacggtgtcgtggaactcaggcgccctgaccagcggcgtgcacaccttcccggctgtcctacagtcctcaggactctactccctcagcagcgtggtgaccgtgccctccagcagcttgggcacccagacctacatctgcaacgtgaatcacaagcccagcaacaccaaggtggacaagaaagttgagcccaaatcttgtgacaaaactcacacatgcccaccgtgcccagcacctgaactcctggggggaccgtcagtcttcctcttccccccaaaacccaaggacaccctcatgatctcccggacccctgaggtcacatgcgtggtggtggacgtgagccacgaagaccctgaggtcaagttcaactggtacgtggacggcgtggaggtgcataatgccaagacaaagccgtgtgaggagcagtacggcagcacgtaccgttgtgtcagcgtcctcaccgtcctgcaccaggactggctgaatggcaaggagtacaagtgcaaggtctccaacaaagccctcccagcccccatcgagaaaaccatctccaaagccaaagggcagccccgagaaccacaggtgtacaccctgcccccatcccgggaggagatgaccaagaaccaggtcagcctgacctgcctggtcaaaggcttctatcccagcgacatcgccgtggagtgggagagcaatgggcagccggagaacaactacaagaccacgcctcccgtgctggactccgacggctccttcttcctctatagcaagctcaccgtggacaagagcaggtggcagcaggggaacgtcttctcatgctccgtgatgcatgaggctctgcacaaccactacacgcagaagagcctctccctgtctccgggtaaa

SEQ ID NO: 2066 - DNA, 1353 bp, synthetic construct
  source 1..1353: mol_type = other DNA
caggtgcagctggtggagtctgggggaggcgtggtccagcctgggaggtccctgagactctcctgtgcagcgtctggattcactttcagtaactttggcatgcactgggtccgccaggctccaggcaaggggctggagtgggtggcagttatatggtatgatggaagtaatgaaaactatgcagacgccgtgaagggccgattcaccatctccagagacaattccaagaatacgctgtatctgcacatgaacagcctgagagtcgcggacacggctgtgtattattgtgcgcgagatgggacgatctttggagtggtcttgggggactactggggccagggaaccctggtcaccgtctcctcagcctccaccaagggcccatcggtcttccccctggcaccctcctccaagagcacctctgggggcacagcggccctgggctgcctggtcaaggactacttccccgaaccggtgacggtgtcgtggaactcaggcgccctgaccagcggcgtgcacaccttcccggctgtcctacagtcctcaggactctactccctcagcagcgtggtgaccgtgccctccagcagcttgggcacccagacctacatctgcaacgtgaatcacaagcccagcaacaccaaggtggacaagaaagttgagcccaaatcttgtgacaaaactcacacatgcccaccgtgcccagcacctgaactcctggggggaccgtcagtcttcctcttccccccaaaacccaaggacaccctcatgatctcccggacccctgaggtcacatgcgtggtggtggacgtgagccacgaagaccctgaggtcaagttcaactggtacgtggacggcgtggaggtgcataatgccaagacaaagccgtgtgaggagcagtacggcagcacgtaccgttgtgtcagcgtcctcaccgtcctgcaccaggactggctgaatggcaaggagtacaagtgcaaggtctccaacaaagccctcccagcccccatcgagaaaaccatctccaaagccaaagggcagccccgagaaccacaggtgtacaccctgcccccatcccgggaggagatgaccaagaaccaggtcagcctgacctgcctggtcaaaggcttctatcccagcgacatcgccgtggagtgggagagcaatgggcagccggagaacaactacaagaccacgcctcccgtgctggactccgacggctccttcttcctctatagcaagctcaccgtggacaagagcaggtggcagcaggggaacgtcttctcatgctccgtgatgcatgaggctctgcacaaccactacacgcagaagagcctctccctgtctccgggtaaa

SEQ ID NO: 2067 - DNA, 1353 bp, synthetic construct
  source 1..1353: mol_type = other DNA
caggtgcagctggtggagtctgggggaggcgtggtccagcctgggaggtccctgagactctcctgtgcagcgtctggattcactttcagtaactttggcatgcactgggtccgccaggctccaggcaaggggctggagtgggtggcagttatatggtatgatgcaagtaatgaaaactatgcagacgccgtgaagggccgattcaccatctccagagacaattccaagaatacgctgtatctgcaaatgaacagcctgagagtcgaggacacggctgtgtattattgtgcgcgagataggacgatctttggagtggtcttgggggactactggggccagggaaccctggtcaccgtctcctcagcctccaccaagggcccatcggtcttccccctggcaccctcctccaagagcacctctgggggcacagcggccctgggctgcctggtcaaggactacttccccgaaccggtgacggtgtcgtggaactcaggcgccctgaccagcggcgtgcacaccttcccggctgtcctacagtcctcaggactctactccctcagcagcgtggtgaccgtgccctccagcagcttgggcacccagacctacatctgcaacgtgaatcacaagcccagcaacaccaaggtggacaagaaagttgagcccaaatcttgtgacaaaactcacacatgcccaccgtgcccagcacctgaactcctggggggaccgtcagtcttcctcttccccccaaaacccaaggacaccctcatgatctcccggacccctgaggtcacatgcgtggtggtggacgtgagccacgaagaccctgaggtcaagttcaactggtacgtggacggcgtggaggtgcataatgccaagacaaagccgtgtgaggagcagtacggcagcacgtaccgttgtgtcagcgtcctcaccgtcctgcaccaggactggctgaatggcaaggagtacaagtgcaaggtctccaacaaagccctcccagcccccatcgagaaaaccatctccaaagccaaagggcagccccgagaaccacaggtgtacaccctgcccccatcccgggaggagatgaccaagaaccaggtcagcctgacctgcctggtcaaaggcttctatcccagcgacatcgccgtggagtgggagagcaatgggcagccggagaacaactacaagaccacgcctcccgtgctggactccgacggctccttcttcctctatagcaagctcaccgtggacaagagcaggtggcagcaggggaacgtcttctcatgctccgtgatgcatgaggctctgcacaaccactacacgcagaagagcctctccctgtctccgggtaaa

SEQ ID NO: 2068 - DNA, 1353 bp, synthetic construct
  source 1..1353: mol_type = other DNA
caggtgcagctggtggagtctgggggaggcgtggtccagcctgggaggtccctgagactctcctgtgcagcgtctggattcactttcagtaactttggcatgcactgggtccgccaggctccaggcaaggggctggagtgggtggcagttatatggtatgatgcaagtaatgaaaactatgcagacgccgtgaagggccgattcaccatctccagagacaattccaagaatacgctgtatctgcaaatgaacagcctgagagtcgaggacacggctgtgtattattgtgcgcgagatgggacgatctttggagtggtcttgggggactactggggccagggaaccctggtcaccgtctcctcagcctccaccaagggcccatcggtcttccccctggcaccctcctccaagagcacctctgggggcacagcggccctgggctgcctggtcaaggactacttccccgaaccggtgacggtgtcgtggaactcaggcgccctgaccagcggcgtgcacaccttcccggctgtcctacagtcctcaggactctactccctcagcagcgtggtgaccgtgccctccagcagcttgggcacccagacctacatctgcaacgtgaatcacaagcccagcaacaccaaggtggacaagaaagttgagcccaaatcttgtgacaaaactcacacatgcccaccgtgcccagcacctgaactcctggggggaccgtcagtcttcctcttccccccaaaacccaaggacaccctcatgatctcccggacccctgaggtcacatgcgtggtggtggacgtgagccacgaagaccctgaggtcaagttcaactggtacgtggacggcgtggaggtgcataatgccaagacaaagccgtgtgaggagcagtacggcagcacgtaccgttgtgtcagcgtcctcaccgtcctgcaccaggactggctgaatggcaaggagtacaagtgcaaggtctccaacaaagccctcccagcccccatcgagaaaaccatctccaaagccaaagggcagccccgagaaccacaggtgtacaccctgcccccatcccgggaggagatgaccaagaaccaggtcagcctgacctgcctggtcaaaggcttctatcccagcgacatcgccgtggagtgggagagcaatgggcagccggagaacaactacaagaccacgcctcccgtgctggactccgacggctccttcttcctctatagcaagctcaccgtggacaagagcaggtggcagcaggggaacgtcttctcatgctccgtgatgcatgaggctctgcacaaccactacacgcagaagagcctctccctgtctccgggtaaa

SEQ ID NO: 2069 - DNA, 1353 bp, synthetic construct
  source 1..1353: mol_type = other DNA
caggtgcagctggtggagtctgggggaggcgtggtccagcctgggaggtccctgagactctcctgtgcagcgtctggattcactttcagtaactttggcatgcactgggtccgccaggccccaggcaaggggctggagtgggtggcagttatatggtatgatggaagtaatgaaaactatgcagactccgtgaagggccgattcaccatctccagagacaattccaagaacacgctgtatctgcacatgaacagcctgagagccgcggacacggctgtgtattactgtgcgagagatgggacgatctttggagtggtcttgggggactactggggccagggaaccctggtcaccgtctcctcagcctccaccaagggcccatcggtcttccccctggcaccctcctccaagagcacctctgggggcacagcggccctgggctgcctggtcaaggactacttccccgaaccggtgacggtgtcgtggaactcaggcgccctgaccagcggcgtgcacaccttcccggctgtcctacagtcctcaggactctactccctcagcagcgtggtgaccgtgccctccagcagcttgggcacccagacctacatctgcaacgtgaatcacaagcccagcaacaccaaggtggacaagaaagttgagcccaaatcttgtgacaaaactcacacatgcccaccgtgcccagcacctgaactcctggggggaccgtcagtcttcctcttccccccaaaacccaaggacaccctcatgatctcccggacccctgaggtcacatgcgtggtggtggacgtgagccacgaagaccctgaggtcaagttcaactggtacgtggacggcgtggaggtgcataatgccaagacaaagccgtgtgaggagcagtacggcagcacgtaccgttgtgtcagcgtcctcaccgtcctgcaccaggactggctgaatggcaaggagtacaagtgcaaggtctccaacaaagccctcccagcccccatcgagaaaaccatctccaaagccaaagggcagccccgagaaccacaggtgtacaccctgcccccatcccgggaggagatgaccaagaaccaggtcagcctgacctgcctggtcaaaggcttctatcccagcgacatcgccgtggagtgggagagcaatgggcagccggagaacaactacaagaccacgcctcccgtgctggactccgacggctccttcttcctctatagcaagctcaccgtggacaagagcaggtggcagcaggggaacgtcttctcatgctccgtgatgcatgaggctctgcacaaccactacacgcagaagagcctctccctgtctccgggtaaa

SEQ ID NO: 2070 - DNA, 1353 bp, synthetic construct
  source 1..1353: mol_type = other DNA
caggtgcagctggtggagtctgggggaggcgtggtccagcctgggaggtccctgagactctcctgtgcagcgtctggattcactttcagtaactttggcatgcactgggtccgccaggccccaggcaaggggctggagtgggtggcagttatatggtatgatgcaagtaatgaaaactatgcagacgccgtgaagggccgattcaccatctccagagacaattccaagaacacgctgtatctgcaaatgaacagcctgagagccgcggacacggctgtgtattactgtgcgagagatgggacgatctttggagtggtcttgggggactactggggccagggaaccctggtcaccgtctcctcagcctccaccaagggcccatcggtcttccccctggcaccctcctccaagagcacctctgggggcacagcggccctgggctgcctggtcaaggactacttccccgaaccggtgacggtgtcgtggaactcaggcgccctgaccagcggcgtgcacaccttcccggctgtcctacagtcctcaggactctactccctcagcagcgtggtgaccgtgccctccagcagcttgggcacccagacctacatctgcaacgtgaatcacaagcccagcaacaccaaggtggacaagaaagttgagcccaaatcttgtgacaaaactcacacatgcccaccgtgcccagcacctgaactcctggggggaccgtcagtcttcctcttccccccaaaacccaaggacaccctcatgatctcccggacccctgaggtcacatgcgtggtggtggacgtgagccacgaagaccctgaggtcaagttcaactggtacgtggacggcgtggaggtgcataatgccaagacaaagccgtgtgaggagcagtacggcagcacgtaccgttgtgtcagcgtcctcaccgtcctgcaccaggactggctgaatggcaaggagtacaagtgcaaggtctccaacaaagccctcccagcccccatcgagaaaaccatctccaaagccaaagggcagccccgagaaccacaggtgtacaccctgcccccatcccgggaggagatgaccaagaaccaggtcagcctgacctgcctggtcaaaggcttctatcccagcgacatcgccgtggagtgggagagcaatgggcagccggagaacaactacaagaccacgcctcccgtgctggactccgacggctccttcttcctctatagcaagctcaccgtggacaagagcaggtggcagcaggggaacgtcttctcatgctccgtgatgcatgaggctctgcacaaccactacacgcagaagagcctctccctgtctccgggtaaa

SEQ ID NO: 2071 - DNA, 1353 bp, synthetic construct
  source 1..1353: mol_type = other DNA
caggtgcagctggtggagtctgggggaggcgtggtccagcctgggaggtccctgagactctcctgtgcagcgtctggattcactttcagtaactttggcatgcactgggtccgccaggccccaggcaaggggctggagtgggtggcagttatatggtatgatgcaagtaatgaaaactatgcagacgccgtgaagggccgattcaccatctccagagacaattccaagaacacgctgtatctgcacatgaacagcctgagagccgcggacacggctgtgtattactgtgcgagagatgggacgatctttggagtggtcttgggggactactggggccagggaaccctggtcaccgtctcctcagcctccaccaagggcccatcggtcttccccctggcaccctcctccaagagcacctctgggggcacagcggccctgggctgcctggtcaaggactacttccccgaaccggtgacggtgtcgtggaactcaggcgccctgaccagcggcgtgcacaccttcccggctgtcctacagtcctcaggactctactccctcagcagcgtggtgaccgtgccctccagcagcttgggcacccagacctacatctgcaacgtgaatcacaagcccagcaacaccaaggtggacaagaaagttgagcccaaatcttgtgacaaaactcacacatgcccaccgtgcccagcacctgaactcctggggggaccgtcagtcttcctcttccccccaaaacccaaggacaccctcatgatctcccggacccctgaggtcacatgcgtggtggtggacgtgagccacgaagaccctgaggtcaagttcaactggtacgtggacggcgtggaggtgcataatgccaagacaaagccgtgtgaggagcagtacggcagcacgtaccgttgtgtcagcgtcctcaccgtcctgcaccaggactggctgaatggcaaggagtacaagtgcaaggtctccaacaaagccctcccagcccccatcgagaaaaccatctccaaagccaaagggcagccccgagaaccacaggtgtacaccctgcccccatcccgggaggagatgaccaagaaccaggtcagcctgacctgcctggtcaaaggcttctatcccagcgacatcgccgtggagtgggagagcaatgggcagccggagaacaactacaagaccacgcctcccgtgctggactccgacggctccttcttcctctatagcaagctcaccgtggacaagagcaggtggcagcaggggaacgtcttctcatgctccgtgatgcatgaggctctgcacaaccactacacgcagaagagcctctccctgtctccgggtaaa

SEQ ID NO: 2072 - DNA, 1353 bp, synthetic construct; identical to SEQ ID NO: 2070
  source 1..1353: mol_type = other DNA

SEQ ID NO: 2073 - DNA, 1353 bp, synthetic construct; identical to SEQ ID NO: 2070
  source 1..1353: mol_type = other DNA

SEQ ID NO: 2074 - DNA, 1353 bp, synthetic construct; identical to SEQ ID NO: 2071
  source 1..1353: mol_type = other DNA

SEQ ID NO: 2075 - DNA, 1353 bp, synthetic construct; identical to SEQ ID NO: 2071
  source 1..1353: mol_type = other DNA

SEQ ID NO: 2076 - DNA, 1353 bp, synthetic construct; identical to SEQ ID NO: 2070
  source 1..1353: mol_type = other DNA

SEQ ID NO: 2077 - DNA, 1353 bp, synthetic construct
  source 1..1353: mol_type = other DNA
caggtgcagctggtggagtctgggggaggcgtggtccagcctgggaggtccctgagactctcctgtgcagcgtctggattcactttcagtaactttggcatgcactgggtccgccaggccccaggcaaggggctggagtgggtggcagttatatggtatgatggaagtaatgaaaactatgcagacgccgtgaagggccgattcaccatctccagagacaattccaagaacacgctgtatctgcaaatgaacagcctgagagccgcggacacggctgtgtattactgtgcgagagatgggacgatctttggagtggtcttgggggactactggggccagggaaccctggtcaccgtctcctcagcctccaccaagggcccatcggtcttccccctggcaccctcctccaagagcacctctgggggcacagcggccctgggctgcctggtcaaggactacttccccgaaccggtgacggtgtcgtggaactcaggcgccctgaccagcggcgtgcacaccttcccggctgtcctacagtcctcaggactctactccctcagcagcgtggtgaccgtgccctccagcagcttgggcacccagacctacatctgcaacgtgaatcacaagcccagcaacaccaaggtggacaagaaagttgagcccaaatcttgtgacaaaactcacacatgcccaccgtgcccagcacctgaactcctggggggaccgtcagtcttcctcttccccccaaaacccaaggacaccctcatgatctcccggacccctgaggtcacatgcgtggtggtggacgtgagccacgaagaccctgaggtcaagttcaactggtacgtggacggcgtggaggtgcataatgccaagacaaagccgtgtgaggagcagtacggcagcacgtaccgttgtgtcagcgtcctcaccgtcctgcaccaggactggctgaatggcaaggagtacaagtgcaaggtctccaacaaagccctcccagcccccatcgagaaaaccatctccaaagccaaagggcagccccgagaaccacaggtgtacaccctgcccccatcccgggaggagatgaccaagaaccaggtcagcctgacctgcctggtcaaaggcttctatcccagcgacatcgccgtggagtgggagagcaatgggcagccggagaacaactacaagaccacgcctcccgtgctggactccgacggctccttcttcctctatagcaagctcaccgtggacaagagcaggtggcagcaggggaacgtcttctcatgctccgtgatgcatgaggctctgcacaaccactacacgcagaagagcctctccctgtctccgggtaaa

SEQ ID NO: 2078 - DNA, 1353 bp, synthetic construct
  source 1..1353: mol_type = other DNA
caggtgcagctggtggagtctgggggaggcgtggtccagcctgggaggtccctgagactctcctgtgcagcgtctggattcactttcagtaactttggcatgcactgggtccgccaggccccaggcaaggggctggagtgggtggcagttatatggtatgatgcaagtaatgaaaactatgcagactccgtgaagggccgattcaccatctccagagacaattccaagaacacgctgtatctgcaaatgaacagcctgagagccgcggacacggctgtgtattactgtgcgagagatgggacgatctttggagtggtcttgggggactactggggccagggaaccctggtcaccgtctcctcagcctccaccaagggcccatcggtcttccccctggcaccctcctccaagagcacctctgggggcacagcggccctgggctgcctggtcaaggactacttccccgaaccggtgacggtgtcgtggaactcaggcgccctgaccagcggcgtgcacaccttcccggctgtcctacagtcctcaggactctactccctcagcagcgtggtgaccgtgccctccagcagcttgggcacccagacctacatctgcaacgtgaatcacaagcccagcaacaccaaggtggacaagaaagttgagcccaaatcttgtgacaaaactcacacatgcccaccgtgcccagcacctgaactcctggggggaccgtcagtcttcctcttccccccaaaacccaaggacaccctcatgatctcccggacccctgaggtcacatgcgtggtggtggacgtgagccacgaagaccctgaggtcaagttcaactggtacgtggacggcgtggaggtgcataatgccaagacaaagccgtgtgaggagcagtacggcagcacgtaccgttgtgtcagcgtcctcaccgtcctgcaccaggactggctgaatggcaaggagtacaagtgcaaggtctccaacaaagccctcccagcccccatcgagaaaaccatctccaaagccaaagggcagccccgagaaccacaggtgtacaccctgcccccatcccgggaggagatgaccaagaaccaggtcagcctgacctgcctggtcaaaggcttctatcccagcgacatcgccgtggagtgggagagcaatgggcagccggagaacaactacaagaccacgcctcccgtgctggactccgacggctccttcttcctctatagcaagctcaccgtggacaagagcaggtggcagcaggggaacgtcttctcatgctccgtgatgcatgaggctctgcacaaccactacacgcagaagagcctctccctgtctccgggtaaa

SEQ ID NO: 2079 - DNA, 1353 bp, synthetic construct
  source 1..1353: mol_type = other DNA
caggtgcagctggtggagtctgggggaggcgtggtccagcctgggaggtccctgagactctcctgtgcagcgtctggattcactttcagtaactttggcatgcactgggtccgccaggccccaggcaaggggctggagtgggtggcagttatatggtatgatgcaagtaatgaaaactatgcagacgccgtgaagggccgattcaccatctccagagacaattccaagaacacgctgtatctgcaaatgaacagcctgagagccgaggacacggctgtgtattactgtgcgagagataggacgatctttggagtggtcttgggggactactggggccagggaaccctggtcaccgtctcctcagcctccaccaagggcccatcggtcttccccctggcaccctcctccaagagcacctctgggggcacagcggccctgggctgcctggtcaaggactacttccccgaaccggtgacggtgtcgtggaactcaggcgccctgaccagcggcgtgcacaccttcccggctgtcctacagtcctcaggactctactccctcagcagcgtggtgaccgtgccctccagcagcttgggcacccagacctacatctgcaacgtgaatcacaagcccagcaacaccaaggtggacaagaaagttgagcccaaatcttgtgacaaaactcacacatgcccaccgtgcccagcacctgaactcctggggggaccgtcagtcttcctcttccccccaaaacccaaggacaccctcatgatctcccggacccctgaggtcacatgcgtggtggtggacgtgagccacgaagaccctgaggtcaagttcaactggtacgtggacggcgtggaggtgcataatgccaagacaaagccgtgtgaggagcagtacggcagcacgtaccgttgtgtcagcgtcctcaccgtcctgcaccaggactggctgaatggcaaggagtacaagtgcaaggtctccaacaaagccctcccagcccccatcgagaaaaccatctccaaagccaaagggcagccccgagaaccacaggtgtacaccctgcccccatcccgggaggagatgaccaagaaccaggtcagcctgacctgcctggtcaaaggcttctatcccagcgacatcgccgtggagtgggagagcaatgggcagccggagaacaactacaagaccacgcctcccgtgctggactccgacggctccttcttcctctatagcaagctcaccgtggacaagagcaggtggcagcaggggaacgtcttctcatgctccgtgatgcatgaggctctgcacaaccactacacgcagaagagcctctccctgtctccgggtaaa

SEQ ID NO: 2080 - DNA, 1353 bp, synthetic construct
  source 1..1353: mol_type = other DNA
caggtgcagctggtggagtctgggggaggcgtggtccagcctgggaggtccctgagactctcctgtgcagcgtctggattcactttcagtaactttggcatgcactgggtccgccaggccccaggcaaggggctggagtgggtggcagttatatggtatgatgcaagtaatgaaaactatgcagacgccgtgaagggccgattcaccatctccagagacaattccaagaacacgctgtatctgcaaatgaacagcctgagagccgaggacacggctgtgtattactgtgcgagagatgggacgatctttggagtggtcttgggggactactggggccagggaaccctggtcaccgtctcctcagcctccaccaagggcccatcggtcttccccctggcaccctcctccaagagcacctctgggggcacagcggccctgggctgcctggtcaaggactacttccccgaaccggtgacggtgtcgtggaactcaggcgccctgaccagcggcgtgcacaccttcccggctgtcctacagtcctcaggactctactccctcagcagcgtggtgaccgtgccctccagcagcttgggcacccagacctacatctgcaacgtgaatcacaagcccagcaacaccaaggtggacaagaaagttgagcccaaatcttgtgacaaaactcacacatgcccaccgtgcccagcacctgaactcctggggggaccgtcagtcttcctcttccccccaaaacccaaggacaccctcatgatctcccggacccctgaggtcacatgcgtggtggtggacgtgagccacgaagaccctgaggtcaagttcaactggtacgtggacggcgtggaggtgcataatgccaagacaaagccgtgtgaggagcagtacggcagcacgtaccgttgtgtcagcgtcctcaccgtcctgcaccaggactggctgaatggcaaggagtacaagtgcaaggtctccaacaaagccctcccagcccccatcgagaaaaccatctccaaagccaaagggcagccccgagaaccacaggtgtacaccctgcccccatcccgggaggagatgaccaagaaccaggtcagcctgacctgcctggtcaaaggcttctatcccagcgacatcgccgtggagtgggagagcaatgggcagccggagaacaactacaagaccacgcctcccgtgctggactccgacggctccttcttcctctatagcaagctcaccgtggacaagagcaggtggcagcaggggaacgtcttctcatgctccgtgatgcatgaggctctgcacaaccactacacgcagaagagcctctccctgtctccgggtaaa

SEQ ID NO: 2081 - DNA, 1350 bp, synthetic construct
  source 1..1350: mol_type = other DNA
caggtgcaactggtggagtctgggggaggcgtggtccagcctgggaggtccctgagactctcctgtgcagcgtctggattcaccttcagtagctatggcatgcactgggtccgccaggctccaggcaaggggctggagtgggtggcagttatatggtatgatgcaagtaataaatactatgcagacgccgtgaagggccgattcaccatctccagggacaattccaagaacacgctgtatctgcaaatgaacagcctgagagccgaggacacggctgtgtattactgtgcgagagataggacgatttttggagtggttcttgactactggggccagggaaccctggtcaccgtctcctcagcctccaccaagggcccatcggtcttccccctggcaccctcctccaagagcacctctgggggcacagcggccctgggctgcctggtcaaggactacttccccgaaccggtgacggtgtcgtggaactcaggcgccctgaccagcggcgtgcacaccttcccggctgtcctacagtcctcaggactctactccctcagcagcgtggtgaccgtgccctccagcagcttgggcacccagacctacatctgcaacgtgaatcacaagcccagcaacaccaaggtggacaagaaagttgagcccaaatcttgtgacaaaactcacacatgcccaccgtgcccagcacctgaactcctggggggaccgtcagtcttcctcttccccccaaaacccaaggacaccctcatgatctcccggacccctgaggtcacatgcgtggtggtggacgtgagccacgaagaccctgaggtcaagttcaactggtacgtggacggcgtggaggtgcataatgccaagacaaagccgtgtgaggagcagtacggcagcacgtaccgttgtgtcagcgtcctcaccgtcctgcaccaggactggctgaatggcaaggagtacaagtgcaaggtctccaacaaagccctcccagcccccatcgagaaaaccatctccaaagccaaagggcagccccgagaaccacaggtgtacaccctgcccccatcccgggaggagatgaccaagaaccaggtcagcctgacctgcctggtcaaaggcttctatcccagcgacatcgccgtggagtgggagagcaatgggcagccggagaacaactacaagaccacgcctcccgtgctggactccgacggctccttcttcctctatagcaagctcaccgtggacaagagcaggtggcagcaggggaacgtcttctcatgctccgtgatgcatgaggctctgcacaaccactacacgcagaagagcctctccctgtctccgggtaaa

SEQ ID NO: 2082 - DNA, 1350 bp, synthetic construct
  source 1..1350: mol_type = other DNA
caggtgcaactggtggagtctgggggaggcgtggtccagcctgggaggtccctgagactctcctgtgcagcgtctggattcaccttcagtagctatggcatgcactgggtccgccaggctccaggcaaggggctggagtgggtggcagttatatggtatgatgcaagtaataaatactatgcagacgccgtgaagggccgattcaccatctccagcgacaattccaagaacacgctgtatctgcaaatgaacagcctgagagccgaggacacggctgtgtattactgtgcgagagataggacgatttttggagtggttcttgactactggggccagggaaccctggtcaccgtctcctcagcctccaccaagggcccatcggtcttccccctggcaccctcctccaagagcacctctgggggcacagcggccctgggctgcctggtcaaggactacttccccgaaccggtgacggtgtcgtggaactcaggcgccctgaccagcggcgtgcacaccttcccggctgtcctacagtcctcaggactctactccctcagcagcgtggtgaccgtgccctccagcagcttgggcacccagacctacatctgcaacgtgaatcacaagcccagcaacaccaaggtggacaagaaagttgagcccaaatcttgtgacaaaactcacacatgcccaccgtgcccagcacctgaactcctggggggaccgtcagtcttcctcttccccccaaaacccaaggacaccctcatgatctcccggacccctgaggtcacatgcgtggtggtggacgtgagccacgaagaccctgaggtcaagttcaactggtacgtggacggcgtggaggtgcataatgccaagacaaagccgtgtgaggagcagtacggcagcacgtaccgttgtgtcagcgtcctcaccgtcctgcaccaggactggctgaatggcaaggagtacaagtgcaaggtctccaacaaagccctcccagcccccatcgagaaaaccatctccaaagccaaagggcagccccgagaaccacaggtgtacaccctgcccccatcccgggaggagatgaccaagaaccaggtcagcctgacctgcctggtcaaaggcttctatcccagcgacatcgccgtggagtgggagagcaatgggcagccggagaacaactacaagaccacgcctcccgtgctggactccgacggctccttcttcctctatagcaagctcaccgtggacaagagcaggtggcagcaggggaacgtcttctcatgctccgtgatgcatgaggctctgcacaaccactacacgcagaagagcctctccctgtctccgggtaaa

SEQ ID NO: 2083 - DNA, 1350 bp, synthetic construct; identical to SEQ ID NO: 2081
  source 1..1350: mol_type = other DNA

SEQ ID NO: 2084 - DNA, 1350 bp, synthetic construct; identical to SEQ ID NO: 2081
  source 1..1350: mol_type = other DNA

SEQ ID NO: 2085 - DNA, 1350 bp, synthetic construct; identical to SEQ ID NO: 2082
  source 1..1350: mol_type = other DNA

SEQ ID NO: 2086 - DNA, 1350 bp, synthetic construct; identical to SEQ ID NO: 2082
  source 1..1350: mol_type = other DNA

SEQ ID NO: 2087 - DNA, 1350 bp, synthetic construct; identical to SEQ ID NO: 2081
  source 1..1350: mol_type = other DNA

SEQ ID NO: 2088 - DNA, 1350 bp, synthetic construct
  source 1..1350: mol_type = other DNA
caggtgcaactggtggagtctgggggaggcgtggtccagcctgggaggtccctgagactctcctgtgcagcgtctggattcaccttcagtagctatggcatgcactgggtccgccaggctccaggcaaggggctggagtgggtggcagttatatggtatgatgcaagtaataaatactatgcagactccgtgaagggccgattcaccatctccagggacaattccaagaacacgctgtatctgcaaatgaacagcctgagagccgaggacacggctgtgtattactgtgcgagagataggacgatttttggagtggttcttgactactggggccagggaaccctggtcaccgtctcctcagcctccaccaagggcccatcggtcttccccctggcaccctcctccaagagcacctctgggggcacagcggccctgggctgcctggtcaaggactacttccccgaaccggtgacggtgtcgtggaactcaggcgccctgaccagcggcgtgcacaccttcccggctgtcctacagtcctcaggactctactccctcagcagcgtggtgaccgtgccctccagcagcttgggcacccagacctacatctgcaacgtgaatcacaagcccagcaacaccaaggtggacaagaaagttgagcccaaatcttgtgacaaaactcacacatgcccaccgtgcccagcacctgaactcctggggggaccgtcagtcttcctcttccccccaaaacccaaggacaccctcatgatctcccggacccctgaggtcacatgcgtggtggtggacgtgagccacgaagaccctgaggtcaagttcaactggtacgtggacggcgtggaggtgcataatgccaagacaaagccgtgtgaggagcagtacggcagcacgtaccgttgtgtcagcgtcctcaccgtcctgcaccaggactggctgaatggcaaggagtacaagtgcaaggtctccaacaaagccctcccagcccccatcgagaaaaccatctccaaagccaaagggcagccccgagaaccacaggtgtacaccctgcccccatcccgggaggagatgaccaagaaccaggtcagcctgacctgcctggtcaaaggcttctatcccagcgacatcgccgtggagtgggagagcaatgggcagccggagaacaactacaagaccacgcctcccgtgctggactccgacggctccttcttcctctatagcaagctcaccgtggacaagagcaggtggcagcaggggaacgtcttctcatgctccgtgatgcatgaggctctgcacaaccactacacgcagaagagcctctccctgtctccgggtaaa

SEQ ID NO: 2089 - DNA, 1350 bp, synthetic construct
  source 1..1350: mol_type = other DNA
caggtgcaactggtggagtctgggggaggcgtggtccagcctgggaggtccctgagactctcctgtgcagcgtctggattcaccttcagtagctatggcatgcactgggtccgccaggctccaggcaaggggctggagtgggtggcagttatatggtatgatggaagtaataaatactatgcagacgccgtgaagggccgattcaccatctccagggacaattccaagaacacgctgtatctgcaaatgaacagcctgagagccgaggacacggctgtgtattactgtgcgagagataggacgatttttggagtggttcttgactactggggccagggaaccctggtcaccgtctcctcagcctccaccaagggcccatcggtcttccccctggcaccctcctccaagagcacctctgggggcacagcggccctgggctgcctggtcaaggactacttccccgaaccggtgacggtgtcgtggaactcaggcgccctgaccagcggcgtgcacaccttcccggctgtcctacagtcctcaggactctactccctcagcagcgtggtgaccgtgccctccagcagcttgggcacccagacctacatctgcaacgtgaatcacaagcccagcaacaccaaggtggacaagaaagttgagcccaaatcttgtgacaaaactcacacatgcccaccgtgcccagcacctgaactcctggggggaccgtcagtcttcctcttccccccaaaacccaaggacaccctcatgatctcccggacccctgaggtcacatgcgtggtggtggacgtgagccacgaagaccctgaggtcaagttcaactggtacgtggacggcgtggaggtgcataatgccaagacaaagccgtgtgaggagcagtacggcagcacgtaccgttgtgtcagcgtcctcaccgtcctgcaccaggactggctgaatggcaaggagtacaagtgcaaggtctccaacaaagccctcccagcccccatcgagaaaaccatctccaaagccaaagggcagccccgagaaccacaggtgtacaccctgcccccatcccgggaggagatgaccaagaaccaggtcagcctgacctgcctggtcaaaggcttctatcccagcgacatcgccgtggagtgggagagcaatgggcagccggagaacaactacaagaccacgcctcccgtgctggactccgacggctccttcttcctctatagcaagctcaccgtggacaagagcaggtggcagcaggggaacgtcttctcatgctccgtgatgcatgaggctctgcacaaccactacacgcagaagagcctctccctgtctccgggtaaa

SEQ ID NO: 2090 - DNA, 1353 bp, synthetic construct; identical to SEQ ID NO: 2056
  source 1..1353: mol_type = other DNA

SEQ ID NO: 2091 - DNA, 1353 bp, synthetic construct; identical to SEQ ID NO: 2061
  source 1..1353: mol_type = other DNA

SEQ ID NO: 2092 - DNA, 1353 bp, synthetic construct; identical to SEQ ID NO: 2056
  source 1..1353: mol_type = other DNA

SEQ ID NO: 2093 - DNA, 1353 bp, synthetic construct; identical to SEQ ID NO: 2061
  source 1..1353: mol_type = other DNA

SEQ ID NO: 2094 - DNA, 1353 bp, synthetic construct; identical to SEQ ID NO: 2044
  source 1..1353: mol_type = other DNA

SEQ ID NO: 2095 - DNA, 1353 bp, synthetic construct; identical to SEQ ID NO: 2057
  source 1..1353: mol_type = other DNA

SEQ ID NO: 2096 - DNA, 1353 bp, synthetic construct; identical to SEQ ID NO: 2058
  source 1..1353: mol_type = other DNA

SEQ ID NO: 2097 - DNA, 1350 bp, synthetic construct
  source 1..1350: mol_type = other DNA
caggtgcagctggtggagtctgggggaggcgtggtccagcctgggaggtccctgagactctcctgtgcagcgtctggattctccttcagtagctatggcatgcactgggtccgccagcctccaggcaaggggctggagtgggtggcagctatatggtatgatgcaaataataaatactatgcagacgccgtgaagggccgattcaccatctccagagacagttccaagaacacgctgtatctgcaaatgaacagcctgagagccgaggacacggctgtgtattactgtgcgagagatcggacgatttttggagtggtccttgagtactggggccagggaaccctggtcaccgtctcctcagcctccaccaagggcccatcggtcttccccctggcaccctcctccaagagcacctctgggggcacagcggccctgggctgcctggtcaaggactacttccccgaaccggtgacggtgtcgtggaactcaggcgccctgaccagcggcgtgcacaccttcccggctgtcctacagtcctcaggactctactccctcagcagcgtggtgaccgtgccctccagcagcttgggcacccagacctacatctgcaacgtgaatcacaagcccagcaacaccaaggtggacaagaaagttgagcccaaatcttgtgacaaaactcacacatgcccaccgtgcccagcacctgaactcctggggggaccgtcagtcttcctcttccccccaaaacccaaggacaccctcatgatctcccggacccctgaggtcacatgcgtggtggtggacgtgagccacgaagaccctgaggtcaagttcaactggtacgtggacggcgtggaggtgcataatgccaagacaaagccgtgtgaggagcagtacggcagcacgtaccgttgtgtcagcgtcctcaccgtcctgcaccaggactggctgaatggcaaggagtacaagtgcaaggtctccaacaaagccctcccagcccccatcgagaaaaccatctccaaagccaaagggcagccccgagaaccacaggtgtacaccctgcccccatcccgggaggagatgaccaagaaccaggtcagcctgacctgcctggtcaaaggcttctatcccagcgacatcgccgtggagtgggagagcaatgggcagccggagaacaactacaagaccacgcctcccgtgctggactccgacggctccttcttcctctatagcaagctcaccgtggacaagagcaggtggcagcaggggaacgtcttctcatgctccgtgatgcatgaggctctgcacaaccactacacgcagaagagcctctccctgtctccgggtaaa

SEQ ID NO: 2098 - DNA, 1350 bp, synthetic construct; identical to SEQ ID NO: 2097
  source 1..1350: mol_type = other DNA

SEQ ID NO: 2099 - DNA, 1350 bp, synthetic construct
  source 1..1350: mol_type = other DNA
caggtgcagctggtggagtctgggggaggcgtggtccagcctgggaggtccctgagactctcctgtgcagcgtctggattctccttcagtagctatggcatgcactgggtccgccagcctccaggcaaggggctggagtgggtggcagctatatggtatgatgcaaataataaatactatgcagacgccgtgaagggccgattcaccatctccagagacagttccaagaacacgctgtatctgcaaatgaacagcctgagagccgaggacacggctgtgtattactgtgcgagagatcggacgatttttggagtggtccttgagtacctcggccagggaaccctggtcaccgtctcctcagcctccaccaagggcccatcggtcttccccctggcaccctcctccaagagcacctctgggggcacagcggccctgggctgcctggtcaaggactacttccccgaaccggtgacggtgtcgtggaactcaggcgccctgaccagcggcgtgcacaccttcccggctgtcctacagtcctcaggactctactccctcagcagcgtggtgaccgtgccctccagcagcttgggcacccagacctacatctgcaacgtgaatcacaagcccagcaacaccaaggtggacaagaaagttgagcccaaatcttgtgacaaaactcacacatgcccaccgtgcccagcacctgaactcctggggggaccgtcagtcttcctcttccccccaaaacccaaggacaccctcatgatctcccggacccctgaggtcacatgcgtggtggtggacgtgagccacgaagaccctgaggtcaagttcaactggtacgtggacggcgtggaggtgcataatgccaagacaaagccgtgtgaggagcagtacggcagcacgtaccgttgtgtcagcgtcctcaccgtcctgcaccaggactggctgaatggcaaggagtacaagtgcaaggtctccaacaaagccctcccagcccccatcgagaaaaccatctccaaagccaaagggcagccccgagaaccacaggtgtacaccctgcccccatcccgggaggagatgaccaagaaccaggtcagcctgacctgcctggtcaaaggcttctatcccagcgacatcgccgtggagtgggagagcaatgggcagccggagaacaactacaagaccacgcctcccgtgctggactccgacggctccttcttcctctatagcaagctcaccgtggacaagagcaggtggcagcaggggaacgtcttctcatgctccgtgatgcatgaggctctgcacaaccactacacgcagaagagcctctccctgtctccgggtaaa

SEQ ID NO: 2100 - DNA, 1350 bp, synthetic construct; identical to SEQ ID NO: 2097
  source 1..1350: mol_type = other DNA

SEQ ID NO: 2101 - DNA, 1350 bp, synthetic construct; identical to SEQ ID NO: 2099
  source 1..1350: mol_type = other DNA

SEQ ID NO: 2102 - DNA, 1350 bp, synthetic construct; identical to SEQ ID NO: 2099
  source 1..1350: mol_type = other DNA

SEQ ID NO: 2103 - DNA, 1350 bp, synthetic construct; identical to SEQ ID NO: 2097
  source 1..1350: mol_type = other DNA

SEQ ID NO: 2104 - DNA, 1350 bp, synthetic construct
  source 1..1350: mol_type = other DNA
caggtgcagctggtggagtctgggggaggcgtggtccagcctgggaggtccctgagactctcctgtgcagcgtctggattctccttcagtagctatggcatgcactgggtccgccagcctccaggcaaggggctggagtgggtggcagctatatggtatgatggaaataataaatactatgcagacgccgtgaagggccgattcaccatctccagagacagttccaagaacacgctgtatctgcaaatgaacagcctgagagccgaggacacggctgtgtattactgtgcgagagatcggacgatttttggagtggtccttgagtactggggccagggaaccctggtcaccgtctcctcagcctccaccaagggcccatcggtcttccccctggcaccctcctccaagagcacctctgggggcacagcggccctgggctgcctggtcaaggactacttccccgaaccggtgacggtgtcgtggaactcaggcgccctgaccagcggcgtgcacaccttcccggctgtcctacagtcctcaggactctactccctcagcagcgtggtgaccgtgccctccagcagcttgggcacccagacctacatctgcaacgtgaatcacaagcccagcaacaccaaggtggacaagaaagttgagcccaaatcttgtgacaaaactcacacatgcccaccgtgcccagcacctgaactcctggggggaccgtcagtcttcctcttccccccaaaacccaaggacaccctcatgatctcccggacccctgaggtcacatgcgtggtggtggacgtgagccacgaagaccctgaggtcaagttcaactggtacgtggacggcgtggaggtgcataatgccaagacaaagccgtgtgaggagcagtacggcagcacgtaccgttgtgtcagcgtcctcaccgtcctgcaccaggactggctgaatggcaaggagtacaagtgcaaggtctccaacaaagccctcccagcccccatcgagaaaaccatctccaaagccaaagggcagccccgagaaccacaggtgtacaccctgcccccatcccgggaggagatgaccaagaaccaggtcagcctgacctgcctggtcaaaggcttctatcccagcgacatcgccgtggagtgggagagcaatgggcagccggagaacaactacaagaccacgcctcccgtgctggactccgacggctccttcttcctctatagcaagctcaccgtggacaagagcaggtggcagcaggggaacgtcttctcatgctccgtgatgcatgaggctctgcacaaccactacacgcagaagagcctctccctgtctccgggtaaa

SEQ ID NO: 2105 - DNA, 1350 bp, synthetic construct
  source 1..1350: mol_type = other DNA
caggtgcagctggtggagtctgggggaggcgtggtccagcctgggaggtccctgagactctcctgtgcagcgtctggattctccttcagtagctatggcatgcactgggtccgccagcctccaggcaaggggctggagtgggtggcagctatatggtatgatgcaaataataaatactatgcagactccgtgaagggccgattcaccatctccagagacagttccaagaacacgctgtatctgcaaatgaacagcctgagagccgaggacacggctgtgtattactgtgcgagagatcggacgatttttggagtggtccttgagtactggggccagggaaccctggtcaccgtctcctcagcctccaccaagggcccatcggtcttccccctggcaccctcctccaagagcacctctgggggcacagcggccctgggctgcctggtcaaggactacttccccgaaccggtgacggtgtcgtggaactcaggcgccctgaccagcggcgtgcacaccttcccggctgtcctacagtcctcaggactctactccctcagcagcgtggtgaccgtgccctccagcagcttgggcacccagacctacatctgcaacgtgaatcacaagcccagcaacaccaaggtggacaagaaagttgagcccaaatcttgtgacaaaactcacacatgcccaccgtgcccagcacctgaactcctggggggaccgtcagtcttcctcttccccccaaaacccaaggacaccctcatgatctcccggacccctgaggtcacatgcgtggtggtggacgtgagccacgaagaccctgaggtcaagttcaactggtacgtggacggcgtggaggtgcataatgccaagacaaagccgtgtgaggagcagtacggcagcacgtaccgttgtgtcagcgtcctcaccgtcctgcaccaggactggctgaatggcaaggagtacaagtgcaaggtctccaacaaagccctcccagcccccatcgagaaaaccatctccaaagccaaagggcagccccgagaaccacaggtgtacaccctgcccccatcccgggaggagatgaccaagaaccaggtcagcctgacctgcctggtcaaaggcttctatcccagcgacatcgccgtggagtgggagagcaatgggcagccggagaacaactacaagaccacgcctcccgtgctggactccgacggctccttcttcctctatagcaagctcaccgtggacaagagcaggtggcagcaggggaacgtcttctcatgctccgtgatgcatgaggctctgcacaaccactacacgcagaagagcctctccctgtctccgggtaaa

SEQ ID NO: 2106 - DNA, 1350 bp, synthetic construct; identical to SEQ ID NO: 2097
  source 1..1350: mol_type = other DNA

SEQ ID NO: 2107 - DNA, 1350 bp, synthetic construct; identical to SEQ ID NO: 2099
  source 1..1350: mol_type = other DNA

SEQ ID NO: 2108 - DNA, 1350 bp, synthetic construct
  source 1..1350: mol_type = other DNA
caggtgcagctggtggagtctgggggaggcgtggtccagcctgggaggtccctgagactctcctgtgcagcgtctggattcagtttcagtagctatggcatgcactgggtccgccaggctccaggcaagggactggagtgggtggcagttatatggtatgatgcaagtaataaatactatgaagacgccgtgaagggccgattcaccatctccagagacaattccaagaacacgctgtttctgcaagtgaacagcctgagagccgaggacacggctgtgtattactgtgcgagagggattacgatttttggtcatgggtttgaatattggggccagggaaccctggtcaccgtctcctcagcctccaccaagggcccatcggtcttccccctggcaccctcctccaagagcacctctgggggcacagcggccctgggctgcctggtcaaggactacttccccgaaccggtgacggtgtcgtggaactcaggcgccctgaccagcggcgtgcacaccttcccggctgtcctacagtcctcaggactctactccctcagcagcgtggtgaccgtgccctccagcagcttgggcacccagacctacatctgcaacgtgaatcacaagcccagcaacaccaaggtggacaagaaagttgagcccaaatcttgtgacaaaactcacacatgcccaccgtgcccagcacctgaactcctggggggaccgtcagtcttcctcttccccccaaaacccaaggacaccctcatgatctcccggacccctgaggtcacatgcgtggtggtggacgtgagccacgaagaccctgaggtcaagttcaactggtacgtggacggcgtggaggtgcataatgccaagacaaagccgtgtgaggagcagtacggcagcacgtaccgttgtgtcagcgtcctcaccgtcctgcaccaggactggctgaatggcaaggagtacaagtgcaaggtctccaacaaagccctcccagcccccatcgagaaaaccatctccaaagccaaagggcagccccgagaaccacaggtgtacaccctgcccccatcccgggaggagatgaccaagaaccaggtcagcctgacctgcctggtcaaaggcttctatcccagcgacatcgccgtggagtgggagagcaatgggcagccggagaacaactacaagaccacgcctcccgtgctggactccgacggctccttcttcctctatagcaagctcaccgtggacaagagcaggtggcagcaggggaacgtcttctcatgctccgtgatgcatgaggctctgcacaaccactacacgcagaagagcctctccctgtctccgggtaaa

SEQ ID NO: 2109 - DNA, 1350 bp, synthetic construct
  source 1..1350: mol_type = other DNA
caggtgcagctggtggagtctgggggaggcgtggtccagcctgggaggtccctgagactctcctgtgcagcgtctggattcagtttcagtagctatggcatgcactgggtccgccaggctccaggcaagggactggagtgggtggcagttatatggtatgatggaagtaataaatactatgaagactccgtgaagggccgattcaccatctccagagacaattccaagaacacgctgtttctgcaagtgaacagcctgagagccgaggacacggctgtgtattactgtgcgagagggattacgatttttggtcatgggtttgaatattggggccagggaaccctggtcaccgtctcctcagcctccaccaagggcccatcggtcttccccctggcaccctcctccaagagcacctctgggggcacagcggccctgggctgcctggtcaaggactacttccccgaaccggtgacggtgtcgtggaactcaggcgccctgaccagcggcgtgcacaccttcccggctgtcctacagtcctcaggactctactccctcagcagcgtggtgaccgtgccctccagcagcttgggcacccagacctacatctgcaacgtgaatcacaagcccagcaacaccaaggtggacaagaaagttgagcccaaatcttgtgacaaaactcacacatgcccaccgtgcccagcacctgaactcctggggggaccgtcagtcttcctcttccccccaaaacccaaggacaccctcatgatctcccggacccctgaggtcacatgcgtggtggtggacgtgagccacgaagaccctgaggtcaagttcaactggtacgtggacggcgtggaggtgcataatgccaagacaaagccgtgtgaggagcagtacggcagcacgtaccgttgtgtcagcgtcctcaccgtcctgcaccaggactggctgaatggcaaggagtacaagtgcaaggtctccaacaaagccctcccagcccccatcgagaaaaccatctccaaagccaaagggcagccccgagaaccacaggtgtacaccctgcccccatcccgggaggagatgaccaagaaccaggtcagcctgacctgcctggtcaaaggcttctatcccagcgacatcgccgtggagtgggagagcaatgggcagccggagaacaactacaagaccacgcctcccgtgctggactccgacggctccttcttcctctatagcaagctcaccgtggacaagagcaggtggcagcaggggaacgtcttctcatgctccgtgatgcatgaggctctgcacaaccactacacgcagaagagcctctccctgtctccgggtaaa

SEQ ID NO: 2110 - DNA, 1350 bp, synthetic construct
  source 1..1350: mol_type = other DNA
caggtgcagctggtggagtctgggggaggcgtggtccagcctgggaggtccctgagactctcctgtgcagcgtctggattcagtttcagtagctatggcatgcactgggtccgccaggctccaggcaagggactggagtgggtggcagttatatggtatgatggaagtaataaatactatgaagacgccgtgaagggccgattcaccatctccagagacaattccaagaacacgctgtttctgcaagtgaacagcctgagagccgaggacacggctgtgtattactgtgcgagagggattacgatttttggtcatgggtttgaatattggggccagggaaccctggtcaccgtctcctcagcctccaccaagggcccatcggtcttccccctggcaccctcctccaagagcacctctgggggcacagcggccctgggctgcctggtcaaggactacttccccgaaccggtgacggtgtcgtggaactcaggcgccctgaccagcggcgtgcacaccttcccggctgtcctacagtcctcaggactctactccctcagcagcgtggtgaccgtgccctccagcagcttgggcacccagacctacatctgcaacgtgaatcacaagcccagcaacaccaaggtggacaagaaagttgagcccaaatcttgtgacaaaactcacacatgcccaccgtgcccagcacctgaactcctggggggaccgtcagtcttcctcttccccccaaaacccaaggacaccctcatgatctcccggacccctgaggtcacatgcgtggtggtggacgtgagccacgaagaccctgaggtcaagttcaactggtacgtggacggcgtggaggtgcataatgccaagacaaagccgtgtgaggagcagtacggcagcacgtaccgttgtgtcagcgtcctcaccgtcctgcaccaggactggctgaatggcaaggagtacaagtgcaaggtctccaacaaagccctcccagcccccatcgagaaaaccatctccaaagccaaagggcagccccgagaaccacaggtgtacaccctgcccccatcccgggaggagatgaccaagaaccaggtcagcctgacctgcctggtcaaaggcttctatcccagcgacatcgccgtggagtgggagagcaatgggcagccggagaacaactacaagaccacgcctcccgtgctggactccgacggctccttcttcctctatagcaagctcaccgtggacaagagcaggtggcagcaggggaacgtcttctcatgctccgtgatgcatgaggctctgcacaaccactacacgcagaagagcctctccctgtctccgggtaaa

SEQ ID NO: 2111 - DNA, 1350 bp, synthetic construct
  source 1..1350: mol_type = other DNA
caggtgcagctggtggagtctgggggaggcgtggtccagcctgggaggtccctgagactctcctgtgcagcgtctggattcagtttcagtagctatggcatgcactgggtccgccaggctccaggcaagggactggagtgggtggcagttatatggtatgatgcaagtaataaatactatgaagactccgtgaagggccgattcaccatctccagagacaattccaagaacacgctgtttctgcaagtgaacagcctgagagccgaggacacggctgtgtattactgtgcgagagggattacgatttttggtcatgggtttgaatattggggccagggaaccctggtcaccgtctcctcagcctccaccaagggcccatcggtcttccccctggcaccctcctccaagagcacctctgggggcacagcggccctgggctgcctggtcaaggactacttccccgaaccggtgacggtgtcgtggaactcaggcgccctgaccagcggcgtgcacaccttcccggctgtcctacagtcctcaggactctactccctcagcagcgtggtgaccgtgccctccagcagcttgggcacccagacctacatctgcaacgtgaatcacaagcccagcaacaccaaggtggacaagaaagttgagcccaaatcttgtgacaaaactcacacatgcccaccgtgcccagcacctgaactcctggggggaccgtcagtcttcctcttccccccaaaacccaaggacaccctcatgatctcccggacccctgaggtcacatgcgtggtggtggacgtgagccacgaagaccctgaggtcaagttcaactggtacgtggacggcgtggaggtgcataatgccaagacaaagccgtgtgaggagcagtacggcagcacgtaccgttgtgtcagcgtcctcaccgtcctgcaccaggactggctgaatggcaaggagtacaagtgcaaggtctccaacaaagccctcccagcccccatcgagaaaaccatctccaaagccaaagggcagccccgagaaccacaggtgtacaccctgcccccatcccgggaggagatgaccaagaaccaggtcagcctgacctgcctggtcaaaggcttctatcccagcgacatcgccgtggagtgggagagcaatgggcagccggagaacaactacaagaccacgcctcccgtgctggactccgacggctccttcttcctctatagcaagctcaccgtggacaagagcaggtggcagcaggggaacgtcttctcatgctccgtgatgcatgaggctctgcacaaccactacacgcagaagagcctctccctgtctccgggtaaa

SEQ ID NO: 2112 - DNA, 1350 bp, synthetic construct
  source 1..1350: mol_type = other DNA
caggtgcagctggtggagtctgggggaggcgtggtccagcctgggaggtccctgagactctcctgtgcagcatctggattcaccttcagtaactatggcatgcactgggtccgccaggctccaggcgaggggctggagtgggtggcagctatatggtttgatgcaagtgataaatactatgcagacgccgtgaagggccgattcaccatctccagagacaactccaagaacacgctgtatctgcaaatgaacagcctgagagccgaggacacggctgtgtattactgtgcgagagatcaggcgatttttggagtggtccccgactactggggccagggaaccctggtcaccgtctcctcagcctccaccaagggcccatcggtcttccccctggcaccctcctccaagagcacctctgggggcacagcggccctgggctgcctggtcaaggactacttccccgaaccggtgacggtgtcgtggaactcaggcgccctgaccagcggcgtgcacaccttcccggctgtcctacagtcctcaggactctactccctcagcagcgtggtgaccgtgccctccagcagcttgggcacccagacctacatctgcaacgtgaatcacaagcccagcaacaccaaggtggacaagaaagttgagcccaaatcttgtgacaaaactcacacatgcccaccgtgcccagcacctgaactcctggggggaccgtcagtcttcctcttccccccaaaacccaaggacaccctcatgatctcccggacccctgaggtcacatgcgtggtggtggacgtgagccacgaagaccctgaggtcaagttcaactggtacgtggacggcgtggaggtgcataatgccaagacaaagccgtgtgaggagcagtacggcagcacgtaccgttgtgtcagcgtcctcaccgtcctgcaccaggactggctgaatggcaaggagtacaagtgcaaggtctccaacaaagccctcccagcccccatcgagaaaaccatctccaaagccaaagggcagccccgagaaccacaggtgtacaccctgcccccatcccgggaggagatgaccaagaaccaggtcagcctgacctgcctggtcaaaggcttctatcccagcgacatcgccgtggagtgggagagcaatgggcagccggagaacaactacaagaccacgcctcccgtgctggactccgacggctccttcttcctctatagcaagctcaccgtggacaagagcaggtggcagcaggggaacgtcttctcatgctccgtgatgcatgaggctctgcacaaccactacacgcagaagagcctctccctgtctccgggtaaa

SEQ ID NO: 2113 - DNA, 1350 bp, synthetic construct
  source 1..1350: mol_type = other DNA
caggtgcagctggtggagtctgggggaggcgtggtccagcctgggaggtccctgagactctcctgtgcagcatctggattcaccttcagtaactatggcatgcactgggtccgccaggctccaggcgaggggctggagtgggtggcagctatatggtttgatgcaagtgataaatactatgcagactccgtgaagggccgattcaccatctccagagacaactccaagaacacgctgtatctgcaaatgaacagcctgagagccgaggacacggctgtgtattactgtgcgagagatcaggcgatttttggagtggtccccgactactggggccagggaaccctggtcaccgtctcctcagcctccaccaagggcccatcggtcttccccctggcaccctcctccaagagcacctctgggggcacagcggccctgggctgcctggtcaaggactacttccccgaaccggtgacggtgtcgtggaactcaggcgccctgaccagcggcgtgcacaccttcccggctgtcctacagtcctcaggactctactccctcagcagcgtggtgaccgtgccctccagcagcttgggcacccagacctacatctgcaacgtgaatcacaagcccagcaacaccaaggtggacaagaaagttgagcccaaatcttgtgacaaaactcacacatgcccaccgtgcccagcacctgaactcctggggggaccgtcagtcttcctcttccccccaaaacccaaggacaccctcatgatctcccggacccctgaggtcacatgcgtggtggtggacgtgagccacgaagaccctgaggtcaagttcaactggtacgtggacggcgtggaggtgcataatgccaagacaaagccgtgtgaggagcagtacggcagcacgtaccgttgtgtcagcgtcctcaccgtcctgcaccaggactggctgaatggcaaggagtacaagtgcaaggtctccaacaaagccctcccagcccccatcgagaaaaccatctccaaagccaaagggcagccccgagaaccacaggtgtacaccctgcccccatcccgggaggagatgaccaagaaccaggtcagcctgacctgcctggtcaaaggcttctatcccagcgacatcgccgtggagtgggagagcaatgggcagccggagaacaactacaagaccacgcctcccgtgctggactccgacggctccttcttcctctatagcaagctcaccgtggacaagagcaggtggcagcaggggaacgtcttctcatgctccgtgatgcatgaggctctgcacaaccactacacgcagaagagcctctccctgtctccgggtaaa

SEQ ID NO: 2114 - DNA, 1350 bp, synthetic construct
  source 1..1350: mol_type = other DNA
caggtgcagctggtggagtctgggggaggcgtggtccagcctgggaggtccctgagactctcctgtgcagcatctggattcaccttcagtaactatggcatgcactgggtccgccaggctccaggcgaggggctggagtgggtggcagctatatggtttgatggaagtgataaatactatgcagacgccgtgaagggccgattcaccatctccagagacaactccaagaacacgctgtatctgcaaatgaacagcctgagagccgaggacacggctgtgtattactgtgcgagagatcaggcgatttttggagtggtccccgactactggggccagggaaccctggtcaccgtctcctcagcctccaccaagggcccatcggtcttccccctggcaccctcctccaagagcacctctgggggcacagcggccctgggctgcctggtcaaggactacttccccgaaccggtgacggtgtcgtggaactcaggcgccctgaccagcggcgtgcacaccttcccggctgtcctacagtcctcaggactctactccctcagcagcgtggtgaccgtgccctccagcagcttgggcacccagacctacatctgcaacgtgaatcacaagcccagcaacaccaaggtggacaagaaagttgagcccaaatcttgtgacaaaactcacacatgcccaccgtgcccagcacctgaactcctggggggaccgtcagtcttcctcttccccccaaaacccaaggacaccctcatgatctcccggacccctgaggtcacatgcgtggtggtggacgtgagccacgaagaccctgaggtcaagttcaactggtacgtggacggcgtggaggtgcataatgccaagacaaagccgtgtgaggagcagtacggcagcacgtaccgttgtgtcagcgtcctcaccgtcctgcaccaggactggctgaatggcaaggagtacaagtgcaaggtctccaacaaagccctcccagcccccatcgagaaaaccatctccaaagccaaagggcagccccgagaaccacaggtgtacaccctgcccccatcccgggaggagatgaccaagaaccaggtcagcctgacctgcctggtcaaaggcttctatcccagcgacatcgccgtggagtgggagagcaatgggcagccggagaacaactacaagaccacgcctcccgtgctggactccgacggctccttcttcctctatagcaagctcaccgtggacaagagcaggtggcagcaggggaacgtcttctcatgctccgtgatgcatgaggctctgcacaaccactacacgcagaagagcctctccctgtctccgggtaaa

SEQ ID NO: 2115 - DNA, 1350 bp, synthetic construct; identical to SEQ ID NO: 2112
  source 1..1350: mol_type = other DNA

SEQ ID NO: 2116 - DNA, 1350 bp, synthetic construct
  source 1..1350: mol_type = other DNA
caggtgcagctggtggagtctgggggaggcgtggtccagcctgggaggtccctgagactctcctgtgcagcatctggattcaccttcagtaactatggcatgcactgggtccgccaggctccaggcaaggggctggagtgggtggcagctatatggtttgatgcaagtgataaatactatgcagacgccgtgaagggccgattcaccatctccagagacaactccaagaacacgctgtatctgcaaatgaacagcctgagagccgaggacacggctgtgtattactgtgcgagagatcaggcgatttttggagtggtccccgactactggggccagggaaccctggtcaccgtctcctcagcctccaccaagggcccatcggtcttccccctggcaccctcctccaagagcacctctgggggcacagcggccctgggctgcctggtcaaggactacttccccgaaccggtgacggtgtcgtggaactcaggcgccctgaccagcggcgtgcacaccttcccggctgtcctacagtcctcaggactctactccctcagcagcgtggtgaccgtgccctccagcagcttgggcacccagacctacatctgcaacgtgaatcacaagcccagcaacaccaaggtggacaagaaagttgagcccaaatcttgtgacaaaactcacacatgcccaccgtgcccagcacctgaactcctggggggaccgtcagtcttcctcttccccccaaaacccaaggacaccctcatgatctcccggacccctgaggtcacatgcgtggtggtggacgtgagccacgaagaccctgaggtcaagttcaactggtacgtggacggcgtggaggtgcataatgccaagacaaagccgtgtgaggagcagtacggcagcacgtaccgttgtgtcagcgtcctcaccgtcctgcaccaggactggctgaatggcaaggagtacaagtgcaaggtctccaacaaagccctcccagcccccatcgagaaaaccatctccaaagccaaagggcagccccgagaaccacaggtgtacaccctgcccccatcccgggaggagatgaccaagaaccaggtcagcctgacctgcctggtcaaaggcttctatcccagcgacatcgccgtggagtgggagagcaatgggcagccggagaacaactacaagaccacgcctcccgtgctggactccgacggctccttcttcctctatagcaagctcaccgtggacaagagcaggtggcagcaggggaacgtcttctcatgctccgtgatgcatgaggctctgcacaaccactacacgcagaagagcctctccctgtctccgggtaaa

SEQ ID NO: 2117 - DNA, 1350 bp, synthetic construct; identical to SEQ ID NO: 2116
  source 1..1350: mol_type = other DNA

SEQ ID NO: 2118 - DNA, 1350 bp, synthetic construct; identical to SEQ ID NO: 2112
  source 1..1350: mol_type = other DNA

SEQ ID NO: 2119 - DNA, 1350 bp, synthetic construct; identical to SEQ ID NO: 2116
  source 1..1350: mol_type = other DNA

SEQ ID NO: 2120 - DNA, 1368 bp, synthetic construct
  source 1..1368: mol_type = other DNA
caggtgcagttgcaggagtcgggcccaggactggtgaagccttcagagaccctgtccctcacctgcactgtctctggtgactccatcagcagtggtggttactactggagctggatccgccagcccccagggaagggcctggagtggattgggtacatctattacagtgggagcacctactacaacccgtccctcaagagtcgagttaccatatcagtagacacgtctaagaaccagttctccctgaagctgagctctgtgactgccgcggacacggccgtgtattactgtgcgagagatcgtattacgatttttggagtggttatggggggcggtatggacgtctggggccaagggaccacggtcaccgtctcctcagcctccaccaagggcccatcggtcttccccctggcaccctcctccaagagcacctctgggggcacagcggccctgggctgcctggtcaaggactacttccccgaaccggtgacggtgtcgtggaactcaggcgccctgaccagcggcgtgcacaccttcccggctgtcctacagtcctcaggactctactccctcagcagcgtggtgaccgtgccctccagcagcttgggcacccagacctacatctgcaacgtgaatcacaagcccagcaacaccaaggtggacaagaaagttgagcccaaatcttgtgacaaaactcacacatgcccaccgtgcccagcacctgaactcctggggggaccgtcagtcttcctcttccccccaaaacccaaggacaccctcatgatctcccggacccctgaggtcacatgcgtggtggtggacgtgagccacgaagaccctgaggtcaagttcaactggtacgtggacggcgtggaggtgcataatgccaagacaaagccgtgtgaggagcagtacggcagcacgtaccgttgtgtcagcgtcctcaccgtcctgcaccaggactggctgaatggcaaggagtacaagtgcaaggtctccaacaaagccctcccagcccccatcgagaaaaccatctccaaagccaaagggcagccccgagaaccacaggtgtacaccctgcccccatcccgggaggagatgaccaagaaccaggtcagcctgacctgcctggtcaaaggcttctatcccagcgacatcgccgtggagtgggagagcaatgggcagccggagaacaactacaagaccacgcctcccgtgctggactccgacggctccttcttcctctatagcaagctcaccgtggacaagagcaggtggcagcaggggaacgtcttctcatgctccgtgatgcatgaggctctgcacaaccactacacgcagaagagcctctccctgtctccgggtaaa

SEQ ID NO: 2121 - DNA, 1368 bp, synthetic construct; identical to SEQ ID NO: 2120
  source 1..1368: mol_type = other DNA

SEQ ID NO: 2122 - DNA, 1368 bp, synthetic construct
  source 1..1368: mol_type = other DNA
caggtgcagttgcaggagtcgggcccaggactggtgaagccttcacagaccctgtccctcacctgcactgtctctggtgactccatcagcagtggtggttactactggagctggatccgccagcccccagggaagggcctggagtggattgggtacatctattacagtgggagcacctactacaacccgtccctcaagagtcgagttaccatatcagtagacacgtctaagaaccagttctccctgaagctgagctctgtgactgccgcggacacggccgtgtattactgtgcgagagatcgtattacgatttttggagtggttatggggggcggtatggacgtctggggccaagggaccacggtcaccgtctcctcagcctccaccaagggcccatcggtcttccccctggcaccctcctccaagagcacctctgggggcacagcggccctgggctgcctggtcaaggactacttccccgaaccggtgacggtgtcgtggaactcaggcgccctgaccagcggcgtgcacaccttcccggctgtcctacagtcctcaggactctactccctcagcagcgtggtgaccgtgccctccagcagcttgggcacccagacctacatctgcaacgtgaatcacaagcccagcaacaccaaggtggacaagaaagttgagcccaaatcttgtgacaaaactcacacatgcccaccgtgcccagcacctgaactcctggggggaccgtcagtcttcctcttccccccaaaacccaaggacaccctcatgatctcccggacccctgaggtcacatgcgtggtggtggacgtgagccacgaagaccctgaggtcaagttcaactggtacgtggacggcgtggaggtgcataatgccaagacaaagccgtgtgaggagcagtacggcagcacgtaccgttgtgtcagcgtcctcaccgtcctgcaccaggactggctgaatggcaaggagtacaagtgcaaggtctccaacaaagccctcccagcccccatcgagaaaaccatctccaaagccaaagggcagccccgagaaccacaggtgtacaccctgcccccatcccgggaggagatgaccaagaaccaggtcagcctgacctgcctggtcaaaggcttctatcccagcgacatcgccgtggagtgggagagcaatgggcagccggagaacaactacaagaccacgcctcccgtgctggactccgacggctccttcttcctctatagcaagctcaccgtggacaagagcaggtggcagcaggggaacgtcttctcatgctccgtgatgcatgaggctctgcacaaccactacacgcagaagagcctctccctgtctccgggtaaa

SEQ ID NO: 2123 - DNA, 1368 bp, synthetic construct
  source 1..1368: mol_type = other DNA
caggtgcagttgcaggagtcgggcccaggactggtgaagccttcagagaccctgtccctcacctgcactgtctctggtgactccatcagcagtggtggttactactggagctggatccgccagcacccagggaagggcctggagtggattgggtacatctattacagtgggagcacctactacaacccgtccctcaagagtcgagttaccatatcagtagacacgtctaagaaccagttctccctgaagctgagctctgtgactgccgcggacacggccgtgtattactgtgcgagagatcgtattacgatttttggagtggttatggggggcggtatggacgtctggggccaagggaccacggtcaccgtctcctcagcctccaccaagggcccatcggtcttccccctggcaccctcctccaagagcacctctgggggcacagcggccctgggctgcctggtcaaggactacttccccgaaccggtgacggtgtcgtggaactcaggcgccctgaccagcggcgtgcacaccttcccggctgtcctacagtcctcaggactctactccctcagcagcgtggtgaccgtgccctccagcagcttgggcacccagacctacatctgcaacgtgaatcacaagcccagcaacaccaaggtggacaagaaagttgagcccaaatcttgtgacaaaactcacacatgcccaccgtgcccagcacctgaactcctggggggaccgtcagtcttcctcttccccccaaaacccaaggacaccctcatgatctcccggacccctgaggtcacatgcgtggtggtggacgtgagccacgaagaccctgaggtcaagttcaactggtacgtggacggcgtggaggtgcataatgccaagacaaagccgtgtgaggagcagtacggcagcacgtaccgttgtgtcagcgtcctcaccgtcctgcaccaggactggctgaatggcaaggagtacaagtgcaaggtctccaacaaagccctcccagcccccatcgagaaaaccatctccaaagccaaagggcagccccgagaaccacaggtgtacaccctgcccccatcccgggaggagatgaccaagaaccaggtcagcctgacctgcctggtcaaaggcttctatcccagcgacatcgccgtggagtgggagagcaatgggcagccggagaacaactacaagaccacgcctcccgtgctggactccgacggctccttcttcctctatagcaagctcaccgtggacaagagcaggtggcagcaggggaacgtcttctcatgctccgtgatgcatgaggctctgcacaaccactacacgcagaagagcctctccctgtctccgggtaaa

SEQ ID NO: 2124 - DNA, 1368 bp, synthetic construct; identical to SEQ ID NO: 2050
  source 1..1368: mol_type = other DNA

SEQ ID NO: 2125 - DNA, 1368 bp, synthetic construct; identical to SEQ ID NO: 2123
  source 1..1368: mol_type = other DNA

SEQ ID NO: 2126 - DNA, 1368 bp, synthetic construct; identical to SEQ ID NO: 2122
  source 1..1368: mol_type = other DNA

SEQ ID NO: 2127 - DNA, 1359 bp, synthetic construct
  source 1..1359: mol_type = other DNA
caggtgcagctggtgcagtctggggctgaggtgaagaagcctggggcctcagtgaaggtctcctgcaaggcttctggatacaccttcaccggctactatatccactgggtgcgacaggcccctggacaagggcttgagtggatggggtggatcaaccctgaaagtggtggcacagactattcacagaggtttcagggcagggtcaccatgaccagggacacgtccatcagcacagcctacatggaactgaacaggctgagatctgacgacacggccgtgtattactgtgcgagagaggccacgatttttggaatggttattgtaccgtttgactactggggccagggaaccctggtcaccgtctcctcagcctccaccaagggcccatcggtcttccccctggcaccctcctccaagagcacctctgggggcacagcggccctgggctgcctggtcaaggactacttccccgaaccggtgacggtgtcgtggaactcaggcgccctgaccagcggcgtgcacaccttcccggctgtcctacagtcctcaggactctactccctcagcagcgtggtgaccgtgccctccagcagcttgggcacccagacctacatctgcaacgtgaatcacaagcccagcaacaccaaggtggacaagaaagttgagcccaaatcttgtgacaaaactcacacatgcccaccgtgcccagcacctgaactcctggggggaccgtcagtcttcctcttccccccaaaacccaaggacaccctcatgatctcccggacccctgaggtcacatgcgtggtggtggacgtgagccacgaagaccctgaggtcaagttcaactggtacgtggacggcgtggaggtgcataatgccaagacaaagccgtgtgaggagcagtacggcagcacgtaccgttgtgtcagcgtcctcaccgtcctgcaccaggactggctgaatggcaaggagtacaagtgcaaggtctccaacaaagccctcccagcccccatcgagaaaaccatctccaaagccaaagggcagccccgagaaccacaggtgtacaccctgcccccatcccgggaggagatgaccaagaaccaggtcagcctgacctgcctggtcaaaggcttctatcccagcgacatcgccgtggagtgggagagcaatgggcagccggagaacaactacaagaccacgcctcccgtgctggactccgacggctccttcttcctctatagcaagctcaccgtggacaagagcaggtggcagcaggggaacgtcttctcatgctccgtgatgcatgaggctctgcacaaccactacacgcagaagagcctctccctgtctccgggtaaa

SEQ ID NO: 2128 - DNA, 1359 bp, synthetic construct
  source 1..1359: mol_type = other DNA
caggtgccgctggtgcagtctggggctgaggtgaagaagcctggggcctcagtgaaggtctcctgcaaggcttctggatacaccttcaccggctactatatccactgggtgcgacaggcccctggacaagggcttgagtggatggggtggatcaaccctgaaagtggtggcacagactattcacagaggtttcagggcaggttcaccatgaccagggacacgtccatcagcacagcctacatggaactgaacaggctgagatctgacgacacggccgtgtattactgtgcgagagaggccacgatttttggaatggttattgtaccgtttgactactggggccagggaaccctggtcaccgtctcctcagcctccaccaagggcccatcggtcttccccctggcaccctcctccaagagcacctctgggggcacagcggccctgggctgcctggtcaaggactacttccccgaaccggtgacggtgtcgtggaactcaggcgccctgaccagcggcgtgcacaccttcccggctgtcctacagtcctcaggactctactccctcagcagcgtggtgaccgtgccctccagcagcttgggcacccagacctacatctgcaacgtgaatcacaagcccagcaacaccaaggtggacaagaaagttgagcccaaatcttgtgacaaaactcacacatgcccaccgtgcccagcacctgaactcctggggggaccgtcagtcttcctcttccccccaaaacccaaggacaccctcatgatctcccggacccctgaggtcacatgcgtggtggtggacgtgagccacgaagaccctgaggtcaagttcaactggtacgtggacggcgtggaggtgcataatgccaagacaaagccgtgtgaggagcagtacggcagcacgtaccgttgtgtcagcgtcctcaccgtcctgcaccaggactggctgaatggcaaggagtacaagtgcaaggtctccaacaaagccctcccagcccccatcgagaaaaccatctccaaagccaaagggcagccccgagaaccacaggtgtacaccctgcccccatcccgggaggagatgaccaagaaccaggtcagcctgacctgcctggtcaaaggcttctatcccagcgacatcgccgtggagtgggagagcaatgggcagccggagaacaactacaagaccacgcctcccgtgctggactccgacggctccttcttcctctatagcaagctcaccgtggacaagagcaggtggcagcaggggaacgtcttctcatgctccgtgatgcatgaggctctgcacaaccactacacgcagaagagcctctccctgtctccgggtaaa

SEQ ID NO: 2129 - DNA, 1359 bp, synthetic construct
  source 1..1359: mol_type = other DNA
caggtgcagctggtgcagtctggggctgaggtgaagaagcctggggcctcagtgaaggtctcctgcaaggcttctggatacaccttcaccggctactatatccactgggtgcgacaggcccctggacaagggcttgagtggatggggtggatcaaccctgacgctggtggcacagactattcacagaggtttcagggcagggtcaccatgaccagggacacgtccatcagcacagcctacatggaactgaacaggctgagatctgacgacacggccgtgtattactgtgcgagagaggccacgatttttggaatggttattgtaccgtttgactactggggccagggaaccctggtcaccgtctcctcagcctccaccaagggcccatcggtcttccccctggcaccctcctccaagagcacctctgggggcacagcggccctgggctgcctggtcaaggactacttccccgaaccggtgacggtgtcgtggaactcaggcgccctgaccagcggcgtgcacaccttcccggctgtcctacagtcctcaggactctactccctcagcagcgtggtgaccgtgccctccagcagcttgggcacccagacctacatctgcaacgtgaatcacaagcccagcaacaccaaggtggacaagaaagttgagcccaaatcttgtgacaaaactcacacatgcccaccgtgcccagcacctgaactcctggggggaccgtcagtcttcctcttccccccaaaacccaaggacaccctcatgatctcccggacccctgaggtcacatgcgtggtggtggacgtgagccacgaagaccctgaggtcaagttcaactggtacgtggacggcgtggaggtgcataatgccaagacaaagccgtgtgaggagcagtacggcagcacgtaccgttgtgtcagcgtcctcaccgtcctgcaccaggactggctgaatggcaaggagtacaagtgcaaggtctccaacaaagccctcccagcccccatcgagaaaaccatctccaaagccaaagggcagccccgagaaccacaggtgtacaccctgcccccatcccgggaggagatgaccaagaaccaggtcagcctgacctgcctggtcaaaggcttctatcccagcgacatcgccgtggagtgggagagcaatgggcagccggagaacaactacaagaccacgcctcccgtgctggactccgacggctccttcttcctctatagcaagctcaccgtggacaagagcaggtggcagcaggggaacgtcttctcatgctccgtgatgcatgaggctctgcacaaccactacacgcagaagagcctctccctgtctccgggtaaa

SEQ ID NO: 2130 - DNA, 1359 bp, synthetic construct
  source 1..1359: mol_type = other DNA
caggtgccgctggtgcagtctggggctgaggtgaagaagcctggggcctcagtgaaggtctcctgcaaggcttctggatacaccttcaccggctactatatccactgggtgcgacaggcccctggacaagggcttgagtggatggggtggatcaaccctgacgctggtggcacagactattcacagaggtttcagggcaggttcaccatgaccagggacacgtccatcagcacagcctacatggaactgaacaggctgagatctgacgacacggccgtgtattactgtgcgagagaggccacgatttttggaatggttattgtaccgtttgactactggggccagggaaccctggtcaccgtctcctcagcctccaccaagggcccatcggtcttccccctggcaccctcctccaagagcacctctgggggcacagcggccctgggctgcctggtcaaggactacttccccgaaccggtgacggtgtcgtggaactcaggcgccctgaccagcggcgtgcacaccttcccggctgtcctacagtcctcaggactctactccctcagcagcgtggtgaccgtgccctccagcagcttgggcacccagacctacatctgcaacgtgaatcacaagcccagcaacaccaaggtggacaagaaagttgagcccaaatcttgtgacaaaactcacacatgcccaccgtgcccagcacctgaactcctggggggaccgtcagtcttcctcttccccccaaaacccaaggacaccctcatgatctcccggacccctgaggtcacatgcgtggtggtggacgtgagccacgaagaccctgaggtcaagttcaactggtacgtggacggcgtggaggtgcataatgccaagacaaagccgtgtgaggagcagtacggcagcacgtaccgttgtgtcagcgtcctcaccgtcctgcaccaggactggctgaatggcaaggagtacaagtgcaaggtctccaacaaagccctcccagcccccatcgagaaaaccatctccaaagccaaagggcagccccgagaaccacaggtgtacaccctgcccccatcccgggaggagatgaccaagaaccaggtcagcctgacctgcctggtcaaaggcttctatcccagcgacatcgccgtggagtgggagagcaatgggcagccggagaacaactacaagaccacgcctcccgtgctggactccgacggctccttcttcctctatagcaagctcaccgtggacaagagcaggtggcagcaggggaacgtcttctcatgctccgtgatgcatgaggctctgcacaaccactacacgcagaagagcctctccctgtctccgggtaaa

SEQ ID NO: 2131 - DNA, 1359 bp, synthetic construct
  source 1..1359: mol_type = other DNA
caggtgcagctggtgcagtctggggctgaggtgaagaagcctggggcctcagtgaaggtctcctgcaaggcttctggatacaccttcaccggctactatatccactgggtgcgacaggcccctggacaagggcttgagtggatggggtggatcaaccctgacagtggtggcacagactattcacagaggtttcagggcagggtcaccatgaccagggacacgtccatcagcacagcctacatggaactgaacaggctgagatctgacgacacggccgtgtattactgtgcgagagaggccacgatttttggaatggttattgtaccgtttgactactggggccagggaaccctggtcaccgtctcctcagcctccaccaagggcccatcggtcttccccctggcaccctcctccaagagcacctctgggggcacagcggccctgggctgcctggtcaaggactacttccccgaaccggtgacggtgtcgtggaactcaggcgccctgaccagcggcgtgcacaccttcccggctgtcctacagtcctcaggactctactccctcagcagcgtggtgaccgtgccctccagcagcttgggcacccagacctacatctgcaacgtgaatcacaagcccagcaacaccaaggtggacaagaaagttgagcccaaatcttgtgacaaaactcacacatgcccaccgtgcccagcacctgaactcctggggggaccgtcagtcttcctcttccccccaaaacccaaggacaccctcatgatctcccggacccctgaggtcacatgcgtggtggtggacgtgagccacgaagaccctgaggtcaagttcaactggtacgtggacggcgtggaggtgcataatgccaagacaaagccgtgtgaggagcagtacggcagcacgtaccgttgtgtcagcgtcctcaccgtcctgcaccaggactggctgaatggcaaggagtacaagtgcaaggtctccaacaaagccctcccagcccccatcgagaaaaccatctccaaagccaaagggcagccccgagaaccacaggtgtacaccctgcccccatcccgggaggagatgaccaagaaccaggtcagcctgacctgcctggtcaaaggcttctatcccagcgacatcgccgtggagtgggagagcaatgggcagccggagaacaactacaagaccacgcctcccgtgctggactccgacggctccttcttcctctatagcaagctcaccgtggacaagagcaggtggcagcaggggaacgtcttctcatgctccgtgatgcatgaggctctgcacaaccactacacgcagaagagcctctccctgtctccgggtaaa

SEQ ID NO: 2132 - DNA, 1359 bp, synthetic construct
  source 1..1359: mol_type = other DNA
caggtgcagctggtgcagtctggggctgaggtgaagaagcctggggcctcagtgaaggtctcctgcaaggcttctggatacaccttcaccggctactatatccactgggtgcgacaggcccctggacaagggcttgagtggatggggtggatcaaccctgacagtggtggcacagactattcacagaggtttcagggcaggttcaccatgaccagggacacgtccatcagcacagcctacatggaactgaacaggctgagatctgacgacacggccgtgtattactgtgcgagagaggccacgatttttggaatggttattgtaccgtttgactactggggccagggaaccctggtcaccgtctcctcagcctccaccaagggcccatcggtcttccccctggcaccctcctccaagagcacctctgggggcacagcggccctgggctgcctggtcaaggactacttccccgaaccggtgacggtgtcgtggaactcaggcgccctgaccagcggcgtgcacaccttcccggctgtcctacagtcctcaggactctactccctcagcagcgtggtgaccgtgccctccagcagcttgggcacccagacctacatctgcaacgtgaatcacaagcccagcaacaccaaggtggacaagaaagttgagcccaaatcttgtgacaaaactcacacatgcccaccgtgcccagcacctgaactcctggggggaccgtcagtcttcctcttccccccaaaacccaaggacaccctcatgatctcccggacccctgaggtcacatgcgtggtggtggacgtgagccacgaagaccctgaggtcaagttcaactggtacgtggacggcgtggaggtgcataatgccaagacaaagccgtgtgaggagcagtacggcagcacgtaccgttgtgtcagcgtcctcaccgtcctgcaccaggactggctgaatggcaaggagtacaagtgcaaggtctccaacaaagccctcccagcccccatcgagaaaaccatctccaaagccaaagggcagccccgagaaccacaggtgtacaccctgcccccatcccgggaggagatgaccaagaaccaggtcagcctgacctgcctggtcaaaggcttctatcccagcgacatcgccgtggagtgggagagcaatgggcagccggagaacaactacaagaccacgcctcccgtgctggactccgacggctccttcttcctctatagcaagctcaccgtggacaagagcaggtggcagcaggggaacgtcttctcatgctccgtgatgcatgaggctctgcacaaccactacacgcagaagagcctctccctgtctccgggtaaa

SEQ ID NO: 2133 - DNA, 1359 bp, synthetic construct
  source 1..1359: mol_type = other DNA
caggtgccgctggtgcagtctggggctgaggtgaagaagcctggggcctcagtgaaggtctcctgcaaggcttctggatacaccttcaccggctactatatccactgggtgcgacaggcccctggacaagggcttgagtggatggggtggatcaaccctgacagtggtggcacagactattcacagaggtttcagggcagggtcaccatgaccagggacacgtccatcagcacagcctacatggaactgaacaggctgagatctgacgacacggccgtgtattactgtgcgagagaggccacgatttttggaatggttattgtaccgtttgactactggggccagggaaccctggtcaccgtctcctcagcctccaccaagggcccatcggtcttccccctggcaccctcctccaagagcacctctgggggcacagcggccctgggctgcctggtcaaggactacttccccgaaccggtgacggtgtcgtggaactcaggcgccctgaccagcggcgtgcacaccttcccggctgtcctacagtcctcaggactctactccctcagcagcgtggtgaccgtgccctccagcagcttgggcacccagacctacatctgcaacgtgaatcacaagcccagcaacaccaaggtggacaagaaagttgagcccaaatcttgtgacaaaactcacacatgcccaccgtgcccagcacctgaactcctggggggaccgtcagtcttcctcttccccccaaaacccaaggacaccctcatgatctcccggacccctgaggtcacatgcgtggtggtggacgtgagccacgaagaccctgaggtcaagttcaactggtacgtggacggcgtggaggtgcataatgccaagacaaagccgtgtgaggagcagtacggcagcacgtaccgttgtgtcagcgtcctcaccgtcctgcaccaggactggctgaatggcaaggagtacaagtgcaaggtctccaacaaagccctcccagcccccatcgagaaaaccatctccaaagccaaagggcagccccgagaaccacaggtgtacaccctgcccccatcccgggaggagatgaccaagaaccaggtcagcctgacctgcctggtcaaaggcttctatcccagcgacatcgccgtggagtgggagagcaatgggcagccggagaacaactacaagaccacgcctcccgtgctggactccgacggctccttcttcctctatagcaagctcaccgtggacaagagcaggtggcagcaggggaacgtcttctcatgctccgtgatgcatgaggctctgcacaaccactacacgcagaagagcctctccctgtctccgggtaaa

SEQ ID NO: 2134 - DNA, 1359 bp, synthetic construct
  source 1..1359: mol_type = other DNA
caggtgcagctggtgcagtctggggctgaggtgaagaagcctggggcctcagtgaaggtctcctgcaaggcttctggatacaccttcaccggctactatatccactgggtgcgacaggcccctggacaagggcttgagtggatggggtggatcaaccctgacgctggtggcacagactattcacagaggtttcagggcaggttcaccatgaccagggacacgtccatcagcacagcctacatggaactgaacaggctgagatctgacgacacggccgtgtattactgtgcgagagaggccacgatttttggaatggttattgtaccgtttgactactggggccagggaaccctggtcaccgtctcctcagcctccaccaagggcccatcggtcttccccctggcaccctcctccaagagcacctctgggggcacagcggccctgggctgcctggtcaaggactacttccccgaaccggtgacggtgtcgtggaactcaggcgccctgaccagcggcgtgcacaccttcccggctgtcctacagtcctcaggactctactccctcagcagcgtggtgaccgtgccctccagcagcttgggcacccagacctacatctgcaacgtgaatcacaagcccagcaacaccaaggtggacaagaaagttgagcccaaatcttgtgacaaaactcacacatgcccaccgtgcccagcacctgaactcctggggggaccgtcagtcttcctcttccccccaaaacccaaggacaccctcatgatctcccggacccctgaggtcacatgcgtggtggtggacgtgagccacgaagaccctgaggtcaagttcaactggtacgtggacggcgtggaggtgcataatgccaagacaaagccgtgtgaggagcagtacggcagcacgtaccgttgtgtcagcgtcctcaccgtcctgcaccaggactggctgaatggcaaggagtacaagtgcaaggtctccaacaaagccctcccagcccccatcgagaaaaccatctccaaagccaaagggcagccccgagaaccacaggtgtacaccctgcccccatcccgggaggagatgaccaagaaccaggtcagcctgacctgcctggtcaaaggcttctatcccagcgacatcgccgtggagtgggagagcaatgggcagccggagaacaactacaagaccacgcctcccgtgctggactccgacggctccttcttcctctatagcaagctcaccgtggacaagagcaggtggcagcaggggaacgtcttctcatgctccgtgatgcatgaggctctgcacaaccactacacgcagaagagcctctccctgtctccgggtaaa

SEQ ID NO: 2135 - DNA, 1359 bp, synthetic construct
  source 1..1359: mol_type = other DNA
caggtgccgctggtgcagtctggggctgaggtgaagaagcctggggcctcagtgaaggtctcctgcaaggcttctggatacaccttcaccggctactatatccactgggtgcgacaggcccctggacaagggcttgagtggatggggtggatcaaccctgacgctggtggcacagactattcacagaggtttcagggcagggtcaccatgaccagggacacgtccatcagcacagcctacatggaactgaacaggctgagatctgacgacacggccgtgtattactgtgcgagagaggccacgatttttggaatggttattgtaccgtttgactactggggccagggaaccctggtcaccgtctcctcagcctccaccaagggcccatcggtcttccccctggcaccctcctccaagagcacctctgggggcacagcggccctgggctgcctggtcaaggactacttccccgaaccggtgacggtgtcgtggaactcaggcgccctgaccagcggcgtgcacaccttcccggctgtcctacagtcctcaggactctactccctcagcagcgtggtgaccgtgccctccagcagcttgggcacccagacctacatctgcaacgtgaatcacaagcccagcaacaccaaggtggacaagaaagttgagcccaaatcttgtgacaaaactcacacatgcccaccgtgcccagcacctgaactcctggggggaccgtcagtcttcctcttccccccaaaacccaaggacaccctcatgatctcccggacccctgaggtcacatgcgtggtggtggacgtgagccacgaagaccctgaggtcaagttcaactggtacgtggacggcgtggaggtgcataatgccaagacaaagccgtgtgaggagcagtacggcagcacgtaccgttgtgtcagcgtcctcaccgtcctgcaccaggactggctgaatggcaaggagtacaagtgcaaggtctccaacaaagccctcccagcccccatcgagaaaaccatctccaaagccaaagggcagccccgagaaccacaggtgtacaccctgcccccatcccgggaggagatgaccaagaaccaggtcagcctgacctgcctggtcaaaggcttctatcccagcgacatcgccgtggagtgggagagcaatgggcagccggagaacaactacaagaccacgcctcccgtgctggactccgacggctccttcttcctctatagcaagctcaccgtggacaagagcaggtggcagcaggggaacgtcttctcatgctccgtgatgcatgaggctctgcacaaccactacacgcagaagagcctctccctgtctccgggtaaa

SEQ ID NO: 2136 - DNA, 1359 bp, synthetic construct
  source 1..1359: mol_type = other DNA
caggtgcagctggtgcagtctggggctgaggtgaagaagcctggggcctcagtgaaggtctcctgcaaggcttctggatacaccttcaccggctactatatccactgggtgcgacaggcccctggacaagggcttgagtggatggggtggatcaaccctgacgctggtggcacagactattcacagaggtttcagggcagggtcaccatgaccagggacacgtccatcagcacagcctacatggaactgaacagcctgagatctgacgacacggccgtgtattactgtgcgagagaggccacgatttttggaatggttattgtaccgtttgactactggggccagggaaccctggtcaccgtctcctcagcctccaccaagggcccatcggtcttccccctggcaccctcctccaagagcacctctgggggcacagcggccctgggctgcctggtcaaggactacttccccgaaccggtgacggtgtcgtggaactcaggcgccctgaccagcggcgtgcacaccttcccggctgtcctacagtcctcaggactctactccctcagcagcgtggtgaccgtgccctccagcagcttgggcacccagacctacatctgcaacgtgaatcacaagcccagcaacaccaaggtggacaagaaagttgagcccaaatcttgtgacaaaactcacacatgcccaccgtgcccagcacctgaactcctggggggaccgtcagtcttcctcttccccccaaaacccaaggacaccctcatgatctcccggacccctgaggtcacatgcgtggtggtggacgtgagccacgaagaccctgaggtcaagttcaactggtacgtggacggcgtggaggtgcataatgccaagacaaagccgtgtgaggagcagtacggcagcacgtaccgttgtgtcagcgtcctcaccgtcctgcaccaggactggctgaatggcaaggagtacaagtgcaaggtctccaacaaagccctcccagcccccatcgagaaaaccatctccaaagccaaagggcagccccgagaaccacaggtgtacaccctgcccccatcccgggaggagatgaccaagaaccaggtcagcctgacctgcctggtcaaaggcttctatcccagcgacatcgccgtggagtgggagagcaatgggcagccggagaacaactacaagaccacgcctcccgtgctggactccgacggctccttcttcctctatagcaagctcaccgtggacaagagcaggtggcagcaggggaacgtcttctcatgctccgtgatgcatgaggctctgcacaaccactacacgcagaagagcctctccctgtctccgggtaaa

SEQ ID NO: 2137 - DNA, 1359 bp, synthetic construct
  source 1..1359: mol_type = other DNA
caggtgcagctggtgcagtctggggctgaggtgaagaagcctggggcctcagtgaaggtctcctgcaaggcttctggatacaccttcaccggctactatatccactgggtgcgacaggcccctggacaagggcttgagtggatggggtggatcaaccctgaaagtggtggcacagactattcacagaggtttcagggcagggtcaccatgaccagggacacgtccatcagcacagcctacatggaactgaacagcctgagatctgacgacacggccgtgtattactgtgcgagagaggccacgatttttggaatggttattgtaccgtttgactactggggccagggaaccctggtcaccgtctcctcagcctccaccaagggcccatcggtcttccccctggcaccctcctccaagagcacctctgggggcacagcggccctgggctgcctggtcaaggactacttccccgaaccggtgacggtgtcgtggaactcaggcgccctgaccagcggcgtgcacaccttcccggctgtcctacagtcctcaggactctactccctcagcagcgtggtgaccgtgccctccagcagcttgggcacccagacctacatctgcaacgtgaatcacaagcccagcaacaccaaggtggacaagaaagttgagcccaaatcttgtgacaaaactcacacatgcccaccgtgcccagcacctgaactcctggggggaccgtcagtcttcctcttccccccaaaacccaaggacaccctcatgatctcccggacccctgaggtcacatgcgtggtggtggacgtgagccacgaagaccctgaggtcaagttcaactggtacgtggacggcgtggaggtgcataatgccaagacaaagccgtgtgaggagcagtacggcagcacgtaccgttgtgtcagcgtcctcaccgtcctgcaccaggactggctgaatggcaaggagtacaagtgcaaggtctccaacaaagccctcccagcccccatcgagaaaaccatctccaaagccaaagggcagccccgagaaccacaggtgtacaccctgcccccatcccgggaggagatgaccaagaaccaggtcagcctgacctgcctggtcaaaggcttctatcccagcgacatcgccgtggagtgggagagcaatgggcagccggagaacaactacaagaccacgcctcccgtgctggactccgacggctccttcttcctctatagcaagctcaccgtggacaagagcaggtggcagcaggggaacgtcttctcatgctccgtgatgcatgaggctctgcacaaccactacacgcagaagagcctctccctgtctccgggtaaa

SEQ ID NO: 2138 - DNA, 1359 bp, synthetic construct
  source 1..1359: mol_type = other DNA
caggtgccgctggtacagtctggggctgaggtgaagaagcctggggcctcagtgaaggtctcctgcaaggcttctggatacaccttcaccggctactatatacactgggtgcgtcaggcccctggacaagggcttgtgtggatggggtggatcagccctaacagtggtgaaacaagctatgcacagaagtttcaggacagggtcaccatgaccagggacacgtccatcagcacagcctatatggagctgagcagactgagatctgacgacacggccgtgtatttctgtgcgagagaggccacgatttttggaatgcttattgtaccatttgactactggggccagggaaccctggtcaccgtctcctcagcctccaccaagggcccatcggtcttccccctggcaccctcctccaagagcacctctgggggcacagcggccctgggctgcctggtcaaggactacttccccgaaccggtgacggtgtcgtggaactcaggcgccctgaccagcggcgtgcacaccttcccggctgtcctacagtcctcaggactctactccctcagcagcgtggtgaccgtgccctccagcagcttgggcacccagacctacatctgcaacgtgaatcacaagcccagcaacaccaaggtggacaagaaagttgagcccaaatcttgtgacaaaactcacacatgcccaccgtgcccagcacctgaactcctggggggaccgtcagtcttcctcttccccccaaaacccaaggacaccctcatgatctcccggacccctgaggtcacatgcgtggtggtggacgtgagccacgaagaccctgaggtcaagttcaactggtacgtggacggcgtggaggtgcataatgccaagacaaagccgtgtgaggagcagtacggcagcacgtaccgttgtgtcagcgtcctcaccgtcctgcaccaggactggctgaatggcaaggagtacaagtgcaaggtctccaacaaagccctcccagcccccatcgagaaaaccatctccaaagccaaagggcagccccgagaaccacaggtgtacaccctgcccccatcccgggaggagatgaccaagaaccaggtcagcctgacctgcctggtcaaaggcttctatcccagcgacatcgccgtggagtgggagagcaatgggcagccggagaacaactacaagaccacgcctcccgtgctggactccgacggctccttcttcctctatagcaagctcaccgtggacaagagcaggtggcagcaggggaacgtcttctcatgctccgtgatgcatgaggctctgcacaaccactacacgcagaagagcctctccctgtctccgggtaaa

SEQ ID NO: 2139 - DNA, 1359 bp, synthetic construct
  source 1..1359: mol_type = other DNA
caggtgccgctggtacagtctggggctgaggtgaagaagcctggggcctcagtgaaggtctcctgcaaggcttctggatacaccttcaccggctactatatacactgggtgcgtcaggcccctggacaagggcttgtgtggatggggtggatcagccctaacagtggtgacacaagctatgcacagaagtttcaggacagggtcaccatgaccagggacacgtccatcagcacagcctatatggagctgagcagactgagatctgacgacacggccgtgtatttctgtgcgagagaggccacgatttttggaatgcttattgtaccatttgactactggggccagggaaccctggtcaccgtctcctcagcctccaccaagggcccatcggtcttccccctggcaccctcctccaagagcacctctgggggcacagcggccctgggctgcctggtcaaggactacttccccgaaccggtgacggtgtcgtggaactcaggcgccctgaccagcggcgtgcacaccttcccggctgtcctacagtcctcaggactctactccctcagcagcgtggtgaccgtgccctccagcagcttgggcacccagacctacatctgcaacgtgaatcacaagcccagcaacaccaaggtggacaagaaagttgagcccaaatcttgtgacaaaactcacacatgcccaccgtgcccagcacctgaactcctggggggaccgtcagtcttcctcttccccccaaaacccaaggacaccctcatgatctcccggacccctgaggtcacatgcgtggtggtggacgtgagccacgaagaccctgaggtcaagttcaactggtacgtggacggcgtggaggtgcataatgccaagacaaagccgtgtgaggagcagtacggcagcacgtaccgttgtgtcagcgtcctcaccgtcctgcaccaggactggctgaatggcaaggagtacaagtgcaaggtctccaacaaagccctcccagcccccatcgagaaaaccatctccaaagccaaagggcagccccgagaaccacaggtgtacaccctgcccccatcccgggaggagatgaccaagaaccaggtcagcctgacctgcctggtcaaaggcttctatcccagcgacatcgccgtggagtgggagagcaatgggcagccggagaacaactacaagaccacgcctcccgtgctggactccgacggctccttcttcctctatagcaagctcaccgtggacaagagcaggtggcagcaggggaacgtcttctcatgctccgtgatgcatgaggctctgcacaaccactacacgcagaagagcctctccctgtctccgggtaaa

SEQ ID NO: 2140 - DNA, 1359 bp, synthetic construct; identical to SEQ ID NO: 2138
  source 1..1359: mol_type = other DNA

SEQ ID NO: 2141 - DNA, 1359 bp, synthetic construct
  source 1..1359: mol_type = other DNA
caggtgccgctggtacagtctggggctgaggtgaagaagcctggggcctcagtgaaggtctcctgcaaggcttctggatacaccttcaccggctactatatacactgggtgcgtcaggcccctggacaagggcttgtgtggatggggtggatcagccctaacagtggtgaaacaagctatgcacagaagtttcaggacagggtcaccatgaccagggacacgtccatcagcacagcctatatggagctgagcagactgagatctgacgacacggccgtgtatttctgtacgagagaggccacgatttttggaatgcttattgtaccatttgactactggggccagggaaccctggtcaccgtctcctcagcctccaccaagggcccatcggtcttccccctggcaccctcctccaagagcacctctgggggcacagcggccctgggctgcctggtcaaggactacttccccgaaccggtgacggtgtcgtggaactcaggcgccctgaccagcggcgtgcacaccttcccggctgtcctacagtcctcaggactctactccctcagcagcgtggtgaccgtgccctccagcagcttgggcacccagacctacatctgcaacgtgaatcacaagcccagcaacaccaaggtggacaagaaagttgagcccaaatcttgtgacaaaactcacacatgcccaccgtgcccagcacctgaactcctggggggaccgtcagtcttcctcttccccccaaaacccaaggacaccctcatgatctcccggacccctgaggtcacatgcgtggtggtggacgtgagccacgaagaccctgaggtcaagttcaactggtacgtggacggcgtggaggtgcataatgccaagacaaagccgtgtgaggagcagtacggcagcacgtaccgttgtgtcagcgtcctcaccgtcctgcaccaggactggctgaatggcaaggagtacaagtgcaaggtctccaacaaagccctcccagcccccatcgagaaaaccatctccaaagccaaagggcagccccgagaaccacaggtgtacaccctgcccccatcccgggaggagatgaccaagaaccaggtcagcctgacctgcctggtcaaaggcttctatcccagcgacatcgccgtggagtgggagagcaatgggcagccggagaacaactacaagaccacgcctcccgtgctggactccgacggctccttcttcctctatagcaagctcaccgtggacaagagcaggtggcagcaggggaacgtcttctcatgctccgtgatgcatgaggctctgcacaaccactacacgcagaagagcctctccctgtctccgggtaaa

SEQ ID NO: 2142 - DNA, 1359 bp, synthetic construct; identical to SEQ ID NO: 2048
  source 1..1359: mol_type = other DNA

SEQ ID NO: 2143 - DNA, 1359 bp, synthetic construct; identical to SEQ ID NO: 2141
  source 1..1359: mol_type = other DNA

SEQ ID NO: 2144 - DNA, 1359 bp, synthetic construct; identical to SEQ ID NO: 2139
  source 1..1359: mol_type = other DNA

SEQ ID NO: 2145 - DNA, 1359 bp, synthetic construct
  source 1..1359: mol_type = other DNA
caggtgcagctggtacagtctggggctgaggtgaagaagcctggggcctcagtgaaggtctcctgcaaggcttctggatacaccttcaccggctactatatacactgggtgcgtcaggcccctggacaagggcttgagtggatggggtggatcagccctaacagtggtgaaacaagctatgcacagaagtttcaggacagggtcaccatgaccagggacacgtccatcagcacagcctatatggagctgagcagcctgagatctgacgacacggccgtgtatttctgtgcgagagaggccacgatttttggaatgcttattgtaccatttgactactggggccagggaaccctggtcaccgtctcctcagcctccaccaagggcccatcggtcttccccctggcaccctcctccaagagcacctctgggggcacagcggccctgggctgcctggtcaaggactacttccccgaaccggtgacggtgtcgtggaactcaggcgccctgaccagcggcgtgcacaccttcccggctgtcctacagtcctcaggactctactccctcagcagcgtggtgaccgtgccctccagcagcttgggcacccagacctacatctgcaacgtgaatcacaagcccagcaacaccaaggtggacaagaaagttgagcccaaatcttgtgacaaaactcacacatgcccaccgtgcccagcacctgaactcctggggggaccgtcagtcttcctcttccccccaaaacccaaggacaccctcatgatctcccggacccctgaggtcacatgcgtggtggtggacgtgagccacgaagaccctgaggtcaagttcaactggtacgtggacggcgtggaggtgcataatgccaagacaaagccgtgtgaggagcagtacggcagcacgtaccgttgtgtcagcgtcctcaccgtcctgcaccaggactggctgaatggcaaggagtacaagtgcaaggtctccaacaaagccctcccagcccccatcgagaaaaccatctccaaagccaaagggcagccccgagaaccacaggtgtacaccctgcccccatcccgggaggagatgaccaagaaccaggtcagcctgacctgcctggtcaaaggcttctatcccagcgacatcgccgtggagtgggagagcaatgggcagccggagaacaactacaagaccacgcctcccgtgctggactccgacggctccttcttcctctatagcaagctcaccgtggacaagagcaggtggcagcaggggaacgtcttctcatgctccgtgatgcatgaggctctgcacaaccactacacgcagaagagcctctccctgtctccgggtaaa

SEQ ID NO: 2146 - DNA, 1359 bp, synthetic construct
  source 1..1359: mol_type = other DNA
caggtgcagctggtacagtctggggctgaggtgaagaagcctggggcctcagtgaaggtctcctgcaaggcttctggatacaccttcaccggctactatatacactgggtgcgtcaggcccctggacaagggcttgagtggatggggtggatcagccctaacagtggtgaaacaagctatgcacagaagtttcaggacagggtcaccatgaccagggacacgtccatcagcacagcctatatggagctgagcagactgagatctgacgacacggccgtgtatttctgtgcgagagaggccacgatttttggaatgcttattgtaccatttgactactggggccagggaaccctggtcaccgtctcctcagcctccaccaagggcccatcggtcttccccctggcaccctcctccaagagcacctctgggggcacagcggccctgggctgcctggtcaaggactacttccccgaaccggtgacggtgtcgtggaactcaggcgccctgaccagcggcgtgcacaccttcccggctgtcctacagtcctcaggactctactccctcagcagcgtggtgaccgtgccctccagcagcttgggcacccagacctacatctgcaacgtgaatcacaagcccagcaacaccaaggtggacaagaaagttgagcccaaatcttgtgacaaaactcacacatgcccaccgtgcccagcacctgaactcctggggggaccgtcagtcttcctcttccccccaaaacccaaggacaccctcatgatctcccggacccctgaggtcacatgcgtggtggtggacgtgagccacgaagaccctgaggtcaagttcaactggtacgtggacggcgtggaggtgcataatgccaagacaaagccgtgtgaggagcagtacggcagcacgtaccgttgtgtcagcgtcctcaccgtcctgcaccaggactggctgaatggcaaggagtacaagtgcaaggtctccaacaaagccctcccagcccccatcgagaaaaccatctccaaagccaaagggcagccccgagaaccacaggtgtacaccctgcccccatcccgggaggagatgaccaagaaccaggtcagcctgacctgcctggtcaaaggcttctatcccagcgacatcgccgtggagtgggagagcaatgggcagccggagaacaactacaagaccacgcctcccgtgctggactccgacggctccttcttcctctatagcaagctcaccgtggacaagagcaggtggcagcaggggaacgtcttctcatgctccgtgatgcatgaggctctgcacaaccactacacgcagaagagcctctccctgtctccgggtaaa

SEQ ID NO: 2147 - DNA, 1359 bp, synthetic construct
  source 1..1359: mol_type = other DNA
caggtgccgctggtgcagtctggggctgaggtgaagaagcctggggcctcagtgaaggtctcctgcaaggcttctggatacaccttcaccggctactatatccactgggtgcgacaggcccctggacaaggacttgagtggatggggtggatcaaccctgaaagtggtggcacagactattcacagaggtttcagggcagggtcaccatgaccagggacacgtccatcagcacagcctacatggaactgagcaggctgagatctgacgacacggccgtgtattactgtgcgagagaggccacgatttttggaatggttattgtaccgtttgactactggggccagggaaccctggtcaccgtctcctcagcctccaccaagggcccatcggtcttccccctggcaccctcctccaagagcacctctgggggcacagcggccctgggctgcctggtcaaggactacttccccgaaccggtgacggtgtcgtggaactcaggcgccctgaccagcggcgtgcacaccttcccggctgtcctacagtcctcaggactctactccctcagcagcgtggtgaccgtgccctccagcagcttgggcacccagacctacatctgcaacgtgaatcacaagcccagcaacaccaaggtggacaagaaagttgagcccaaatcttgtgacaaaactcacacatgcccaccgtgcccagcacctgaactcctggggggaccgtcagtcttcctcttccccccaaaacccaaggacaccctcatgatctcccggacccctgaggtcacatgcgtggtggtggacgtgagccacgaagaccctgaggtcaagttcaactggtacgtggacggcgtggaggtgcataatgccaagacaaagccgtgtgaggagcagtacggcagcacgtaccgttgtgtcagcgtcctcaccgtcctgcaccaggactggctgaatggcaaggagtacaagtgcaaggtctccaacaaagccctcccagcccccatcgagaaaaccatctccaaagccaaagggcagccccgagaaccacaggtgtacaccctgcccccatcccgggaggagatgaccaagaaccaggtcagcctgacctgcctggtcaaaggcttctatcccagcgacatcgccgtggagtgggagagcaatgggcagccggagaacaactacaagaccacgcctcccgtgctggactccgacggctccttcttcctctatagcaagctcaccgtggacaagagcaggtggcagcaggggaacgtcttctcatgctccgtgatgcatgaggctctgcacaaccactacacgcagaagagcctctccctgtctccgggtaaa

SEQ ID NO: 2148 - DNA, 1359 bp, synthetic construct
  source 1..1359: mol_type = other DNA
caggtgccgctggtgcagtctggggctgaggtgaagaagcctggggcctcagtgaaggtctcctgcaaggcttctggatacaccttcaccggctactatatccactgggtgcgacaggcccctggacaaggacttgagtggatggggtggatcaaccctgaaagtggtggcacagactattcacagaggtttcagggcaggttcaccatgaccagggacacgtccatcagcacagcctacatggaactgagcaggctgagatctgacgacacggccgtgtattactgtgcgagagaggccacgatttttggaatggttattgtaccgtttgactactggggccagggaaccctggtcaccgtctcctcagcctccaccaagggcccatcggtcttccccctggcaccctcctccaagagcacctctgggggcacagcggccctgggctgcctggtcaaggactacttccccgaaccggtgacggtgtcgtggaactcaggcgccctgaccagcggcgtgcacaccttcccggctgtcctacagtcctcaggactctactccctcagcagcgtggtgaccgtgccctccagcagcttgggcacccagacctacatctgcaacgtgaatcacaagcccagcaacaccaaggtggacaagaaagttgagcccaaatcttgtgacaaaactcacacatgcccaccgtgcccagcacctgaactcctggggggaccgtcagtcttcctcttccccccaaaacccaaggacaccctcatgatctcccggacccctgaggtcacatgcgtggtggtggacgtgagccacgaagaccctgaggtcaagttcaactggtacgtggacggcgtggaggtgcataatgccaagacaaagccgtgtgaggagcagtacggcagcacgtaccgttgtgtcagcgtcctcaccgtcctgcaccaggactggctgaatggcaaggagtacaagtgcaaggtctccaacaaagccctcccagcccccatcgagaaaaccatctccaaagccaaagggcagccccgagaaccacaggtgtacaccctgcccccatcccgggaggagatgaccaagaaccaggtcagcctgacctgcctggtcaaaggcttctatcccagcgacatcgccgtggagtgggagagcaatgggcagccggagaacaactacaagaccacgcctcccgtgctggactccgacggctccttcttcctctatagcaagctcaccgtggacaagagcaggtggcagcaggggaacgtcttctcatgctccgtgatgcatgaggctctgcacaaccactacacgcagaagagcctctccctgtctccgggtaaa

SEQ ID NO: 2149 - DNA, 1359 bp, synthetic construct
  source 1..1359: mol_type = other DNA
caggtgccgctggtgcagtctggggctgaggtgaagaagcctggggcctcagtgaaggtctcctgcaaggcttctggatacaccttcaccggctactatatccactgggtgcgacaggcccctggacaaggacttgagtggatggggtggatcaaccctgacagtggtggcacagactattcacagaggtttcagggcagggtcaccatgaccagggacacgtccatcagcacagcctacatggaactgagcaggctgagatctgacgacacggccgtgtattactgtgcgagagaggccacgatttttggaatggttattgtaccgtttgactactggggccagggaaccctggtcaccgtctcctcagcctccaccaagggcccatcggtcttccccctggcaccctcctccaagagcacctctgggggcacagcggccctgggctgcctggtcaaggactacttccccgaaccggtgacggtgtcgtggaactcaggcgccctgaccagcggcgtgcacaccttcccggctgtcctacagtcctcaggactctactccctcagcagcgtggtgaccgtgccctccagcagcttgggcacccagacctacatctgcaacgtgaatcacaagcccagcaacaccaaggtggacaagaaagttgagcccaaatcttgtgacaaaactcacacatgcccaccgtgcccagcacctgaactcctggggggaccgtcagtcttcctcttccccccaaaacccaaggacaccctcatgatctcccggacccctgaggtcacatgcgtggtggtggacgtgagccacgaagaccctgaggtcaagttcaactggtacgtggacggcgtggaggtgcataatgccaagacaaagccgtgtgaggagcagtacggcagcacgtaccgttgtgtcagcgtcctcaccgtcctgcaccaggactggctgaatggcaaggagtacaagtgcaaggtctccaacaaagccctcccagcccccatcgagaaaaccatctccaaagccaaagggcagccccgagaaccacaggtgtacaccctgcccccatcccgggaggagatgaccaagaaccaggtcagcctgacctgcctggtcaaaggcttctatcccagcgacatcgccgtggagtgggagagcaatgggcagccggagaacaactacaagaccacgcctcccgtgctggactccgacggctccttcttcctctatagcaagctcaccgtggacaagagcaggtggcagcaggggaacgtcttctcatgctccgtgatgcatgaggctctgcacaaccactacacgcagaagagcctctccctgtctccgggtaaa

SEQ ID NO: 2150 - DNA, 1359 bp, synthetic construct
  source 1..1359: mol_type = other DNA
caggtgcagctggtgcagtctggggctgaggtgaagaagcctggggcctcagtgaaggtctcctgcaaggcttctggatacaccttcaccggctactatatccactgggtgcgacaggcccctggacaaggacttgagtggatggggtggatcaaccctgaaagtggtggcacagactattcacagaggtttcagggcagggtcaccatgaccagggacacgtccatcagcacagcctacatggaactgagcagcctgagatctgacgacacggccgtgtattactgtgcgagagaggccacgatttttggaatggttattgtaccgtttgactactggggccagggaaccctggtcaccgtctcctcagcctccaccaagggcccatcggtcttccccctggcaccctcctccaagagcacctctgggggcacagcggccctgggctgcctggtcaaggactacttccccgaaccggtgacggtgtcgtggaactcaggcgccctgaccagcggcgtgcacaccttcccggctgtcctacagtcctcaggactctactccctcagcagcgtggtgaccgtgccctccagcagcttgggcacccagacctacatctgcaacgtgaatcacaagcccagcaacaccaaggtggacaagaaagttgagcccaaatcttgtgacaaaactcacacatgcccaccgtgcccagcacctgaactcctggggggaccgtcagtcttcctcttccccccaaaacccaaggacaccctcatgatctcccggacccctgaggtcacatgcgtggtggtggacgtgagccacgaagaccctgaggtcaagttcaactggtacgtggacggcgtggaggtgcataatgccaagacaaagccgtgtgaggagcagtacggcagcacgtaccgttgtgtcagcgtcctcaccgtcctgcaccaggactggctgaatggcaaggagtacaagtgcaaggtctccaacaaagccctcccagcccccatcgagaaaaccatctccaaagccaaagggcagccccgagaaccacaggtgtacaccctgcccccatcccgggaggagatgaccaagaaccaggtcagcctgacctgcctggtcaaaggcttctatcccagcgacatcgccgtggagtgggagagcaatgggcagccggagaacaactacaagaccacgcctcccgtgctggactccgacggctccttcttcctctatagcaagctcaccgtggacaagagcaggtggcagcaggggaacgtcttctcatgctccgtgatgcatgaggctctgcacaaccactacacgcagaagagcctctccctgtctccgggtaaa

SEQ ID NO: 2151 - DNA, 1359 bp, synthetic construct; identical to SEQ ID NO: 2147
  source 1..1359: mol_type = other DNA

SEQ ID NO: 2152 - DNA, 1359 bp, synthetic construct
  source 1..1359: mol_type = other DNA
caggtgccgctggtgcagtctggggctgaggtgaagaagcctggggcctcagtgaaggtctcctgcaaggcttctggatacaccttcaccggctactatatacactgggtgcgtcaggcccctggacaagggcttgagtggatggggtggataagccctaaccaaggtgaaacaaactatgcacagaagtttcaggacagggtcaccatgaccagggacacgtccatcagcacagcctatatggagctgagcaggctgagatctgacgacacggccgtgtattactgtgcgagagaggccacgatttttggaatgcttattgtaccatttgactactggggccagggaaccctggtcaccgtctcctcagcctccaccaagggcccatcggtcttccccctggcaccctcctccaagagcacctctgggggcacagcggccctgggctgcctggtcaaggactacttccccgaaccggtgacggtgtcgtggaactcaggcgccctgaccagcggcgtgcacaccttcccggctgtcctacagtcctcaggactctactccctcagcagcgtggtgaccgtgccctccagcagcttgggcacccagacctacatctgcaacgtgaatcacaagcccagcaacaccaaggtggacaagaaagttgagcccaaatcttgtgacaaaactcacacatgcccaccgtgcccagcacctgaactcctggggggaccgtcagtcttcctcttccccccaaaacccaaggacaccctcatgatctcccggacccctgaggtcacatgcgtggtggtggacgtgagccacgaagaccctgaggtcaagttcaactggtacgtggacggcgtggaggtgcataatgccaagacaaagccgtgtgaggagcagtacggcagcacgtaccgttgtgtcagcgtcctcaccgtcctgcaccaggactggctgaatggcaaggagtacaagtgcaaggtctccaacaaagccctcccagcccccatcgagaaaaccatctccaaagccaaagggcagccccgagaaccacaggtgtacaccctgcccccatcccgggaggagatgaccaagaaccaggtcagcctgacctgcctggtcaaaggcttctatcccagcgacatcgccgtggagtgggagagcaatgggcagccggagaacaactacaagaccacgcctcccgtgctggactccgacggctccttcttcctctatagcaagctcaccgtggacaagagcaggtggcagcaggggaacgtcttctcatgctccgtgatgcatgaggctctgcacaaccactacacgcagaagagcctctccctgtctccgggtaaa

SEQ ID NO: 2153 - DNA, 1359 bp, synthetic construct
  source 1..1359: mol_type = other DNA
caggtgccgctggtgcagtctggggctgaggtgaagaagcctggggcctcagtgaaggtctcctgcaaggcttctggatacaccttcaccggctactatatacactgggtgcgtcaggcccctggacaagggcttgagtggatggggtggataagccctaaccaaggtgacacaaactatgcacagaagtttcaggacagggtcaccatgaccagggacacgtccatcagcacagcctatatggagctgagcaggctgagatctgacgacacggccgtgtattactgtgcgagagaggccacgatttttggaatgcttattgtaccatttgactactggggccagggaaccctggtcaccgtctcctcagcctccaccaagggcccatcggtcttccccctggcaccctcctccaagagcacctctgggggcacagcggccctgggctgcctggtcaaggactacttccccgaaccggtgacggtgtcgtggaactcaggcgccctgaccagcggcgtgcacaccttcccggctgtcctacagtcctcaggactctactccctcagcagcgtggtgaccgtgccctccagcagcttgggcacccagacctacatctgcaacgtgaatcacaagcccagcaacaccaaggtggacaagaaagttgagcccaaatcttgtgacaaaactcacacatgcccaccgtgcccagcacctgaactcctggggggaccgtcagtcttcctcttccccccaaaacccaaggacaccctcatgatctcccggacccctgaggtcacatgcgtggtggtggacgtgagccacgaagaccctgaggtcaagttcaactggtacgtggacggcgtggaggtgcataatgccaagacaaagccgtgtgaggagcagtacggcagcacgtaccgttgtgtcagcgtcctcaccgtcctgcaccaggactggctgaatggcaaggagtacaagtgcaaggtctccaacaaagccctcccagcccccatcgagaaaaccatctccaaagccaaagggcagccccgagaaccacaggtgtacaccctgcccccatcccgggaggagatgaccaagaaccaggtcagcctgacctgcctggtcaaaggcttctatcccagcgacatcgccgtggagtgggagagcaatgggcagccggagaacaactacaagaccacgcctcccgtgctggactccgacggctccttcttcctctatagcaagctcaccgtggacaagagcaggtggcagcaggggaacgtcttctcatgctccgtgatgcatgaggctctgcacaaccactacacgcagaagagcctctccctgtctccgggtaaa

SEQ ID NO: 2154 - DNA, 1359 bp, synthetic construct
  source 1..1359: mol_type = other DNA
caggtgccgctggtgcagtctggggctgaggtgaagaagcctggggcctcagtgaaggtctcctgcaaggcttctggatacaccttcaccggctactatatacactgggtgcgtcaggcccctggacaagggcttgagtggatggggtggataagccctaaccaaggtgaaacaaactatgcacagaagtttcaggacagggtcaccatgaccagggacacgtccatcagcacagcctatatggagctgagcaggctgagatctgacgacacggccgtgtattactgtacgagagaggccacgatttttggaatgcttattgtaccatttgactactggggccagggaaccctggtcaccgtctcctcagcctccaccaagggcccatcggtcttccccctggcaccctcctccaagagcacctctgggggcacagcggccctgggctgcctggtcaaggactacttccccgaaccggtgacggtgtcgtggaactcaggcgccctgaccagcggcgtgcacaccttcccggctgtcctacagtcctcaggactctactccctcagcagcgtggtgaccgtgccctccagcagcttgggcacccagacctacatctgcaacgtgaatcacaagcccagcaacaccaaggtggacaagaaagttgagcccaaatcttgtgacaaaactcacacatgcccaccgtgcccagcacctgaactcctggggggaccgtcagtcttcctcttccccccaaaacccaaggacaccctcatgatctcccggacccctgaggtcacatgcgtggtggtggacgtgagccacgaagaccctgaggtcaagttcaactggtacgtggacggcgtggaggtgcataatgccaagacaaagccgtgtgaggagcagtacggcagcacgtaccgttgtgtcagcgtcctcaccgtcctgcaccaggactggctgaatggcaaggagtacaagtgcaaggtctccaacaaagccctcccagcccccatcgagaaaaccatctccaaagccaaagggcagccccgagaaccacaggtgtacaccctgcccccatcccgggaggagatgaccaagaaccaggtcagcctgacctgcctggtcaaaggcttctatcccagcgacatcgccgtggagtgggagagcaatgggcagccggagaacaactacaagaccacgcctcccgtgctggactccgacggctccttcttcctctatagcaagctcaccgtggacaagagcaggtggcagcaggggaacgtcttctcatgctccgtgatgcatgaggctctgcacaaccactacacgcagaagagcctctccctgtctccgggtaaa

SEQ ID NO: 2155 - DNA, 1359 bp, synthetic construct
  source 1..1359: mol_type = other DNA
caggtgccgctggtgcagtctggggctgaggtgaagaagcctggggcctcagtgaaggtctcctgcaaggcttctggatacaccttcaccggctactatatacactgggtgcgtcaggcccctggacaagggcttgagtggatggggtggataagccctaacaatggtgaaacaaactatgcacagaagtttcaggacagggtcaccatgaccagggacacgtccatcagcacagcctatatggagctgagcaggctgagatctgacgacacggccgtgtattactgtgcgagagaggccacgatttttggaatgcttattgtaccatttgactactggggccagggaaccctggtcaccgtctcctcagcctccaccaagggcccatcggtcttccccctggcaccctcctccaagagcacctctgggggcacagcggccctgggctgcctggtcaaggactacttccccgaaccggtgacggtgtcgtggaactcaggcgccctgaccagcggcgtgcacaccttcccggctgtcctacagtcctcaggactctactccctcagcagcgtggtgaccgtgccctccagcagcttgggcacccagacctacatctgcaacgtgaatcacaagcccagcaacaccaaggtggacaagaaagttgagcccaaatcttgtgacaaaactcacacatgcccaccgtgcccagcacctgaactcctggggggaccgtcagtcttcctcttccccccaaaacccaaggacaccctcatgatctcccggacccctgaggtcacatgcgtggtggtggacgtgagccacgaagaccctgaggtcaagttcaactggtacgtggacggcgtggaggtgcataatgccaagacaaagccgtgtgaggagcagtacggcagcacgtaccgttgtgtcagcgtcctcaccgtcctgcaccaggactggctgaatggcaaggagtacaagtgcaaggtctccaacaaagccctcccagcccccatcgagaaaaccatctccaaagccaaagggcagccccgagaaccacaggtgtacaccctgcccccatcccgggaggagatgaccaagaaccaggtcagcctgacctgcctggtcaaaggcttctatcccagcgacatcgccgtggagtgggagagcaatgggcagccggagaacaactacaagaccacgcctcccgtgctggactccgacggctccttcttcctctatagcaagctcaccgtggacaagagcaggtggcagcaggggaacgtcttctcatgctccgtgatgcatgaggctctgcacaaccactacacgcagaagagcctctccctgtctccgggtaaa

SEQ ID NO: 2156 - DNA, 1359 bp, synthetic construct
  source 1..1359: mol_type = other DNA
caggtgccgctggtgcagtctggggctgaggtgaagaagcctggggcctcagtgaaggtctcctgcaaggcttctggatacaccttcaccggctactatatacactgggtgcgtcaggcccctggacaagggcttgagtggatggggtggataagccctaacaatggtgacacaaactatgcacagaagtttcaggacagggtcaccatgaccagggacacgtccatcagcacagcctatatggagctgagcaggctgagatctgacgacacggccgtgtattactgtgcgagagaggccacgatttttggaatgcttattgtaccatttgactactggggccagggaaccctggtcaccgtctcctcagcctccaccaagggcccatcggtcttccccctggcaccctcctccaagagcacctctgggggcacagcggccctgggctgcctggtcaaggactacttccccgaaccggtgacggtgtcgtggaactcaggcgccctgaccagcggcgtgcacaccttcccggctgtcctacagtcctcaggactctactccctcagcagcgtggtgaccgtgccctccagcagcttgggcacccagacctacatctgcaacgtgaatcacaagcccagcaacaccaaggtggacaagaaagttgagcccaaatcttgtgacaaaactcacacatgcccaccgtgcccagcacctgaactcctggggggaccgtcagtcttcctcttccccccaaaacccaaggacaccctcatgatctcccggacccctgaggtcacatgcgtggtggtggacgtgagccacgaagaccctgaggtcaagttcaactggtacgtggacggcgtggaggtgcataatgccaagacaaagccgtgtgaggagcagtacggcagcacgtaccgttgtgtcagcgtcctcaccgtcctgcaccaggactggctgaatggcaaggagtacaagtgcaaggtctccaacaaagccctcccagcccccatcgagaaaaccatctccaaagccaaagggcagccccgagaaccacaggtgtacaccctgcccccatcccgggaggagatgaccaagaaccaggtcagcctgacctgcctggtcaaaggcttctatcccagcgacatcgccgtggagtgggagagcaatgggcagccggagaacaactacaagaccacgcctcccgtgctggactccgacggctccttcttcctctatagcaagctcaccgtggacaagagcaggtggcagcaggggaacgtcttctcatgctccgtgatgcatgaggctctgcacaaccactacacgcagaagagcctctccctgtctccgggtaaa

SEQ ID NO: 2157 - DNA, 1359 bp, synthetic construct
  source 1..1359: mol_type = other DNA
caggtgccgctggtgcagtctggggctgaggtgaagaagcctggggcctcagtgaaggtctcctgcaaggcttctggatacaccttcaccggctactatatacactgggtgcgtcaggcccctggacaagggcttgagtggatggggtggataagccctaaccaaggtgacacaaactatgcacagaagtttcaggacagggtcaccatgaccagggacacgtccatcagcacagcctatatggagctgagcaggctgagatctgacgacacggccgtgtattactgtacgagagaggccacgatttttggaatgcttattgtaccatttgactactggggccagggaaccctggtcaccgtctcctcagcctccaccaagggcccatcggtcttccccctggcaccctcctccaagagcacctctgggggcacagcggccctgggctgcctggtcaaggactacttccccgaaccggtgacggtgtcgtggaactcaggcgccctgaccagcggcgtgcacaccttcccggctgtcctacagtcctcaggactctactccctcagcagcgtggtgaccgtgccctccagcagcttgggcacccagacctacatctgcaacgtgaatcacaagcccagcaacaccaaggtggacaagaaagttgagcccaaatcttgtgacaaaactcacacatgcccaccgtgcccagcacctgaactcctggggggaccgtcagtcttcctcttccccccaaaacccaaggacaccctcatgatctcccggacccctgaggtcacatgcgtggtggtggacgtgagccacgaagaccctgaggtcaagttcaactggtacgtggacggcgtggaggtgcataatgccaagacaaagccgtgtgaggagcagtacggcagcacgtaccgttgtgtcagcgtcctcaccgtcctgcaccaggactggctgaatggcaaggagtacaagtgcaaggtctccaacaaagccctcccagcccccatcgagaaaaccatctccaaagccaaagggcagccccgagaaccacaggtgtacaccctgcccccatcccgggaggagatgaccaagaaccaggtcagcctgacctgcctggtcaaaggcttctatcccagcgacatcgccgtggagtgggagagcaatgggcagccggagaacaactacaagaccacgcctcccgtgctggactccgacggctccttcttcctctatagcaagctcaccgtggacaagagcaggtggcagcaggggaacgtcttctcatgctccgtgatgcatgaggctctgcacaaccactacacgcagaagagcctctccctgtctccgggtaaa

SEQ ID NO: 2158 - DNA, 1359 bp, synthetic construct
  source 1..1359: mol_type = other DNA
caggtgccgctggtgcagtctggggctgaggtgaagaagcctggggcctcagtgaaggtctcctgcaaggcttctggatacaccttcaccggctactatatacactgggtgcgtcaggcccctggacaagggcttgagtggatggggtggataagccctaacaatggtgaaacaaactatgcacagaagtttcaggacagggtcaccatgaccagggacacgtccatcagcacagcctatatggagctgagcaggctgagatctgacgacacggccgtgtattactgtacgagagaggccacgatttttggaatgcttattgtaccatttgactactggggccagggaaccctggtcaccgtctcctcagcctccaccaagggcccatcggtcttccccctggcaccctcctccaagagcacctctgggggcacagcggccctgggctgcctggtcaaggactacttccccgaaccggtgacggtgtcgtggaactcaggcgccctgaccagcggcgtgcacaccttcccggctgtcctacagtcctcaggactctactccctcagcagcgtggtgaccgtgccctccagcagcttgggcacccagacctacatctgcaacgtgaatcacaagcccagcaacaccaaggtggacaagaaagttgagcccaaatcttgtgacaaaactcacacatgcccaccgtgcccagcacctgaactcctggggggaccgtcagtcttcctcttccccccaaaacccaaggacaccctcatgatctcccggacccctgaggtcacatgcgtggtggtggacgtgagccacgaagaccctgaggtcaagttcaactggtacgtggacggcgtggaggtgcataatgccaagacaaagccgtgtgaggagcagtacggcagcacgtaccgttgtgtcagcgtcctcaccgtcctgcaccaggactggctgaatggcaaggagtacaagtgcaaggtctccaacaaagccctcccagcccccatcgagaaaaccatctccaaagccaaagggcagccccgagaaccacaggtgtacaccctgcccccatcccgggaggagatgaccaagaaccaggtcagcctgacctgcctggtcaaaggcttctatcccagcgacatcgccgtggagtgggagagcaatgggcagccggagaacaactacaagaccacgcctcccgtgctggactccgacggctccttcttcctctatagcaagctcaccgtggacaagagcaggtggcagcaggggaacgtcttctcatgctccgtgatgcatgaggctctgcacaaccactacacgcagaagagcctctccctgtctccgggtaaa

SEQ ID NO: 2159 - DNA, 1359 bp, synthetic construct; identical to SEQ ID NO: 2152
  source 1..1359: mol_type = other DNA

SEQ ID NO: 2160 - DNA, 1359 bp, synthetic construct; identical to SEQ ID NO: 2156
  source 1..1359: mol_type = other DNA

SEQ ID NO: 2161 - DNA, 1359 bp, synthetic construct; identical to SEQ ID NO: 2153
  source 1..1359: mol_type = other DNA

SEQ ID NO: 2162 - DNA, 1359 bp, synthetic construct; identical to SEQ ID NO: 2155
  source 1..1359: mol_type = other DNA

SEQ ID NO: 2163 - DNA, 1359 bp, synthetic construct
  source 1..1359: mol_type = other DNA
caggtgcagctggtgcagtctggggctgaggtgaagaagcctggggcctcagtgaaggtctcctgcaaggcttctggatacaccttcaccggctactatatacactgggtgcgtcaggcccctggacaagggcttgagtggatggggtggataagccctaaccaaggtgaaacaaactatgcacagaagtttcaggacagggtcaccatgaccagggacacgtccatcagcacagcctatatggagctgagcagcctgagatctgacgacacggccgtgtattactgtgcgagagaggccacgatttttggaatgcttattgtaccatttgactactggggccagggaaccctggtcaccgtctcctcagcctccaccaagggcccatcggtcttccccctggcaccctcctccaagagcacctctgggggcacagcggccctgggctgcctggtcaaggactacttccccgaaccggtgacggtgtcgtggaactcaggcgccctgaccagcggcgtgcacaccttcccggctgtcctacagtcctcaggactctactccctcagcagcgtggtgaccgtgccctccagcagcttgggcacccagacctacatctgcaacgtgaatcacaagcccagcaacaccaaggtggacaagaaagttgagcccaaatcttgtgacaaaactcacacatgcccaccgtgcccagcacctgaactcctggggggaccgtcagtcttcctcttccccccaaaacccaaggacaccctcatgatctcccggacccctgaggtcacatgcgtggtggtggacgtgagccacgaagaccctgaggtcaagttcaactggtacgtggacggcgtggaggtgcataatgccaagacaaagccgtgtgaggagcagtacggcagcacgtaccgttgtgtcagcgtcctcaccgtcctgcaccaggactggctgaatggcaaggagtacaagtgcaaggtctccaacaaagccctcccagcccccatcgagaaaaccatctccaaagccaaagggcagccccgagaaccacaggtgtacaccctgcccccatcccgggaggagatgaccaagaaccaggtcagcctgacctgcctggtcaaaggcttctatcccagcgacatcgccgtggagtgggagagcaatgggcagccggagaacaactacaagaccacgcctcccgtgctggactccgacggctccttcttcctctatagcaagctcaccgtggacaagagcaggtggcagcaggggaacgtcttctcatgctccgtgatgcatgaggctctgcacaaccactacacgcagaagagcctctccctgtctccgggtaaa

SEQ ID NO: 2164 - DNA, 1359 bp, synthetic construct; identical to SEQ ID NO: 2163
  source 1..1359: mol_type = other DNA

SEQ ID NO: 2165 - DNA, 1374 bp, synthetic construct; identical to SEQ ID NO: 2042
  source 1..1374: mol_type = other DNA

SEQ ID NO: 2166 - DNA, 1374 bp, synthetic construct; identical to SEQ ID NO: 2042
  source 1..1374: mol_type = other DNA

SEQ ID NO: 2167 - DNA, 1374 bp, synthetic construct; identical to SEQ ID NO: 2042
  source 1..1374: mol_type = other DNA

SEQ ID NO: 2168 - DNA, 1374 bp, synthetic construct; identical to SEQ ID NO: 2042
  source 1..1374: mol_type = other DNA

SEQ ID NO: 2169 - DNA, 1374 bp, synthetic construct; identical to SEQ ID NO: 2042
  source 1..1374: mol_type = other DNA

SEQ ID NO: 2170 - DNA, 1374 bp, synthetic construct; identical to SEQ ID NO: 2042
  source 1..1374: mol_type = other DNA

SEQ ID NO: 2171 - DNA, 1374 bp, synthetic construct; identical to SEQ ID NO: 2042
  source 1..1374: mol_type = other DNA

SEQ ID NO: 2172 - DNA, 1374 bp, synthetic construct; identical to SEQ ID NO: 2042
  source 1..1374: mol_type = other DNA

SEQ ID NO: 2173 - DNA, 1374 bp, synthetic construct; identical to SEQ ID NO: 2042
  source 1..1374: mol_type = other DNA

SEQ ID NO: 2174 - DNA, 1374 bp, synthetic construct; identical to SEQ ID NO: 2042
  source 1..1374: mol_type = other DNA

SEQ ID NO: 2175 - DNA, 1374 bp, synthetic construct; identical to SEQ ID NO: 2042
  source 1..1374: mol_type = other DNA

SEQ ID NO: 2176 - DNA, 1374 bp, synthetic construct; identical to SEQ ID NO: 2042
  source 1..1374: mol_type = other DNA

SEQ ID NO: 2177 - DNA, 1374 bp, synthetic construct
  source 1..1374: mol_type = other DNA
cagatgcaggtggtgcagtctggggctgaggtgaagaagcctggggcctcagtgaaggtctcctgcaaggcttccggatacaccttcaccggctactatatgcattgggtgcgacaggcccctggacaagggcttgagtggatgggatggatcaaccctaacagtggtggcacaaactatgcacagaagtttcagggcagggtcaccatgaccagggacacgtccatcagtacagcctacatggagctgagcagcctgaggtctgacgacacggccgtgtattactgtgcgagagggggggattacgttttcgggacttatcggcctcactactactacggtatggacgtctggggccaagggaccacggtcaccgtctcctcagcctccaccaagggcccatcggtcttccccctggcaccctcctccaagagcacctctgggggcacagcggccctgggctgcctggtcaaggactacttccccgaaccggtgacggtgtcgtggaactcaggcgccctgaccagcggcgtgcacaccttcccggctgtcctacagtcctcaggactctactccctcagcagcgtggtgaccgtgccctccagcagcttgggcacccagacctacatctgcaacgtgaatcacaagcccagcaacaccaaggtggacaagaaagttgagcccaaatcttgtgacaaaactcacacatgcccaccgtgcccagcacctgaactcctggggggaccgtcagtcttcctcttccccccaaaacccaaggacaccctcatgatctcccggacccctgaggtcacatgcgtggtggtggacgtgagccacgaagaccctgaggtcaagttcaactggtacgtggacggcgtggaggtgcataatgccaagacaaagccgtgtgaggagcagtacggcagcacgtaccgttgtgtcagcgtcctcaccgtcctgcaccaggactggctgaatggcaaggagtacaagtgcaaggtctccaacaaagccctcccagcccccatcgagaaaaccatctccaaagccaaagggcagccccgagaaccacaggtgtacaccctgcccccatcccgggaggagatgaccaagaaccaggtcagcctgacctgcctggtcaaaggcttctatcccagcgacatcgccgtggagtgggagagcaatgggcagccggagaacaactacaagaccacgcctcccgtgctggactccgacggctccttcttcctctatagcaagctcaccgtggacaagagcaggtggcagcaggggaacgtcttctcatgctccgtgatgcatgaggctctgcacaaccactacacgcagaagagcctctccctgtctccgggtaaa

SEQ ID NO: 2178 - DNA, 1374 bp, synthetic construct
  source 1..1374: mol_type = other DNA
cagatgcaggtggtgcagtctggggctgaggtgaagaagcctggggcctcagtgaaggtctcctgcaaggcttccggatacaccttcaccggctactatatgcattgggtgcgacaggcccctggacaagggcttgagtggatgggatggatcaaccctaacagtggtggcacaaactatgcacagaagtttcagggcagggtcaccatgaccagggacacgtccatcagtacagcctacatggagctgagcaggctgaggtctgacgacacggccgtgtattactgtgcgagagggggggattacgttttcgggacttatcggcctcactactactacggtatggacgtctggggccaagggaccacggtcaccgtctcctcagcctccaccaagggcccatcggtcttccccctggcaccctcctccaagagcacctctgggggcacagcggccctgggctgcctggtcaaggactacttccccgaaccggtgacggtgtcgtggaactcaggcgccctgaccagcggcgtgcacaccttcccggctgtcctacagtcctcaggactctactccctcagcagcgtggtgaccgtgccctccagcagcttgggcacccagacctacatctgcaacgtgaatcacaagcccagcaacaccaaggtggacaagaaagttgagcccaaatcttgtgacaaaactcacacatgcccaccgtgcccagcacctgaactcctggggggaccgtcagtcttcctcttccccccaaaacccaaggacaccctcatgatctcccggacccctgaggtcacatgcgtggtggtggacgtgagccacgaagaccctgaggtcaagttcaactggtacgtggacggcgtggaggtgcataatgccaagacaaagccgtgtgaggagcagtacggcagcacgtaccgttgtgtcagcgtcctcaccgtcctgcaccaggactggctgaatggcaaggagtacaagtgcaaggtctccaacaaagccctcccagcccccatcgagaaaaccatctccaaagccaaagggcagccccgagaaccacaggtgtacaccctgcccccatcccgggaggagatgaccaagaaccaggtcagcctgacctgcctggtcaaaggcttctatcccagcgacatcgccgtggagtgggagagcaatgggcagccggagaacaactacaagaccacgcctcccgtgctggactccgacggctccttcttcctctatagcaagctcaccgtggacaagagcaggtggcagcaggggaacgtcttctcatgctccgtgatgcatgaggctctgcacaaccactacacgcagaagagcctctccctgtctccgggtaaa

SEQ ID NO: 2179 - DNA, 1353 bp, synthetic construct; identical to SEQ ID NO: 2079
  source 1..1353: mol_type = other DNA

SEQ ID NO: 2180 - DNA, 1353 bp, synthetic construct; identical to SEQ ID NO: 2061
  source 1..1353: mol_type = other DNA

SEQ ID NO: 2181 - DNA, 1374 bp, synthetic construct; identical to SEQ ID NO: 2042
  source 1..1374: mol_type = other DNA

SEQ ID NO: 2182 - DNA, 1353 bp, synthetic construct
  source 1..1353: mol_type = other DNA
caggtgcagttggtggagtctgggggaggcgtggtccagcctgggaggtccctgagactctcctgtacagcgtctggattcaccttcagtagctatggcatacactgggtccgccaggctccaggcaaggggctggagtgggtggcagttatatggtatgatggaagtaataagttccatgcagactccgtgaagggccgattcaccatctccagagacaattccaagaacacgctgtatctgcaaatgaacagcctgagagccgaggactcggctatgtacttctgtgcgagaggaaaagtggctggtatgcctgaagcttttgaaatctggggccaagggacaaaggtcaccgtctcttcagcctccaccaagggcccatcggtcttccccctggcaccctcctccaagagcacctctgggggcacagcggccctgggctgcctggtcaaggactacttccccgaaccggtgacggtgtcgtggaactcaggcgccctgaccagcggcgtgcacaccttcccggctgtcctacagtcctcaggactctactccctcagcagcgtggtgaccgtgccctccagcagcttgggcacccagacctacatctgcaacgtgaatcacaagcccagcaacaccaaggtggacaagaaagttgagcccaaatcttgtgacaaaactcacacatgcccaccgtgcccagcacctgaactcctggggggaccgtcagtcttcctcttccccccaaaacccaaggacaccctcatgatctcccggacccctgaggtcacatgcgtggtggtggacgtgagccacgaagaccctgaggtcaagttcaactggtacgtggacggcgtggaggtgcataatgccaagacaaagccgtgtgaggagcagtacggcagcacgtaccgttgtgtcagcgtcctcaccgtcctgcaccaggactggctgaatggcaaggagtacaagtgcaaggtctccaacaaagccctcccagcccccatcgagaaaaccatctccaaagccaaagggcagccccgagaaccacaggtgtacaccctgcccccatcccgggaggagatgaccaagaaccaggtcagcctgacctgcctggtcaaaggcttctatcccagcgacatcgccgtggagtgggagagcaatgggcagccggagaacaactacaagaccacgcctcccgtgctggactccgacggctccttcttcctctatagcaagctcaccgtggacaagagcaggtggcagcaggggaacgtcttctcatgctccgtgatgcatgaggctctgcacaaccactacacgcagaagagcctctccctgtctccgggtaaa

SEQ ID NO: 2183 - DNA, 1377 bp, synthetic construct
  source 1..1377: mol_type = other DNA
caaatgcagctggtgcagtctggggctgaggtgaagaagcctggggcctcagtgaaggtctcctgcaaggcttctggatacaccttcaccagttatgatatcaactgggtgcgacaggccactggacaagggcttgagtggatgggatggatgaaccctaacagtggtaacacaggctatgcacagaagttccagggcagagtcaccatgaccagggacacctccataagcacagcctacatggagctgagcagcctgagatctcaggacacggccgtgtattactgtgcgagagggggtgattacgtttgggggagttatcgtccctactactactactacggtatggacgtctggggccaagggaccacggtcaccgtctcctcagcctccaccaagggcccatcggtcttccccctggcaccctcctccaagagcacctctgggggcacagcggccctgggctgcctggtcaaggactacttccccgaaccggtgacggtgtcgtggaactcaggcgccctgaccagcggcgtgcacaccttcccggctgtcctacagtcctcaggactctactccctcagcagcgtggtgaccgtgccctccagcagcttgggcacccagacctacatctgcaacgtgaatcacaagcccagcaacaccaaggtggacaagaaagttgagcccaaatcttgtgacaaaactcacacatgcccaccgtgcccagcacctgaactcctggggggaccgtcagtcttcctcttccccccaaaacccaaggacaccctcatgatctcccggacccctgaggtcacatgcgtggtggtggacgtgagccacgaagaccctgaggtcaagttcaactggtacgtggacggcgtggaggtgcataatgccaagacaaagccgtgtgaggagcagtacggcagcacgtaccgttgtgtcagcgtcctcaccgtcctgcaccaggactggctgaatggcaaggagtacaagtgcaaggtctccaacaaagccctcccagcccccatcgagaaaaccatctccaaagccaaagggcagccccgagaaccacaggtgtacaccctgcccccatcccgggaggagatgaccaagaaccaggtcagcctgacctgcctggtcaaaggcttctatcccagcgacatcgccgtggagtgggagagcaatgggcagccggagaacaactacaagaccacgcctcccgtgctggactccgacggctccttcttcctctatagcaagctcaccgtggacaagagcaggtggcagcaggggaacgtcttctcatgctccgtgatgcatgaggctctgcacaaccactacacgcagaagagcctctccctgtctccgggtaaa

SEQ ID NO: 2184 - DNA, 1353 bp, synthetic construct
  source 1..1353: mol_type = other DNA
caggtgcagttggtggagtctgggggaggcgtggtccagcctgggaggtccctgagactctcctgtgcagcgtctggattcaccttcagtagctatggcatacactgggtccgccaggctccaggcaaggggctggagtgggtggcagttatatggtatgatgcaagtaataagttccatgcagacgccgtgaagggccgattcaccatctccagagacaattccaagaacacgctgtatctgcaaatgaacagcctgagagccgaggactcggctatgtacttctgtgcgagaggaaaagtggctggtatgcctgaagcttttgaaatctggggccaagggacaaaggtcaccgtctcttcagcctccaccaagggcccatcggtcttccccctggcaccctcctccaagagcacctctgggggcacagcggccctgggctgcctggtcaaggactacttccccgaaccggtgacggtgtcgtggaactcaggcgccctgaccagcggcgtgcacaccttcccggctgtcctacagtcctcaggactctactccctcagcagcgtggtgaccgtgccctccagcagcttgggcacccagacctacatctgcaacgtgaatcacaagcccagcaacaccaaggtggacaagaaagttgagcccaaatcttgtgacaaaactcacacatgcccaccgtgcccagcacctgaactcctggggggaccgtcagtcttcctcttccccccaaaacccaaggacaccctcatgatctcccggacccctgaggtcacatgcgtggtggtggacgtgagccacgaagaccctgaggtcaagttcaactggtacgtggacggcgtggaggtgcataatgccaagacaaagccgtgtgaggagcagtacggcagcacgtaccgttgtgtcagcgtcctcaccgtcctgcaccaggactggctgaatggcaaggagtacaagtgcaaggtctccaacaaagccctcccagcccccatcgagaaaaccatctccaaagccaaagggcagccccgagaaccacaggtgtacaccctgcccccatcccgggaggagatgaccaagaaccaggtcagcctgacctgcctggtcaaaggcttctatcccagcgacatcgccgtggagtgggagagcaatgggcagccggagaacaactacaagaccacgcctcccgtgctggactccgacggctccttcttcctctatagcaagctcaccgtggacaagagcaggtggcagcaggggaacgtcttctcatgctccgtgatgcatgaggctctgcacaaccactacacgcagaagagcctctccctgtctccgggtaaa

SEQ ID NO: 2185 - DNA, 1353 bp, synthetic construct
  source 1..1353: mol_type = other DNA
caggtgcagttggtggagtctgggggaggcgtggtccagcctgggaggtccctgagactctcctgtacagcgtctggattcaccttcagtagctatggcatacactgggtccgccaggctccaggcaaggggctggagtgggtggcagttatatggtatgatgcaagtaataagttccatgcagacgccgtgaagggccgattcaccatctccagagacaattccaagaacacgctgtatctgcaaatgaacagcctgagagccgaggactcggctatgtacttctgtgcgagaggaaaagtggctggtatgcctgaagcttttgaaatctggggccaagggacaaaggtcaccgtctcttcagcctccaccaagggcccatcggtcttccccctggcaccctcctccaagagcacctctgggggcacagcggccctgggctgcctggtcaaggactacttccccgaaccggtgacggtgtcgtggaactcaggcgccctgaccagcggcgtgcacaccttcccggctgtcctacagtcctcaggactctactccctcagcagcgtggtgaccgtgccctccagcagcttgggcacccagacctacatctgcaacgtgaatcacaagcccagcaacaccaaggtggacaagaaagttgagcccaaatcttgtgacaaaactcacacatgcccaccgtgcccagcacctgaactcctggggggaccgtcagtcttcctcttccccccaaaacccaaggacaccctcatgatctcccggacccctgaggtcacatgcgtggtggtggacgtgagccacgaagaccctgaggtcaagttcaactggtacgtggacggcgtggaggtgcataatgccaagacaaagccgtgtgaggagcagtacggcagcacgtaccgttgtgtcagcgtcctcaccgtcctgcaccaggactggctgaatggcaaggagtacaagtgcaaggtctccaacaaagccctcccagcccccatcgagaaaaccatctccaaagccaaagggcagccccgagaaccacaggtgtacaccctgcccccatcccgggaggagatgaccaagaaccaggtcagcctgacctgcctggtcaaaggcttctatcccagcgacatcgccgtggagtgggagagcaatgggcagccggagaacaactacaagaccacgcctcccgtgctggactccgacggctccttcttcctctatagcaagctcaccgtggacaagagcaggtggcagcaggggaacgtcttctcatgctccgtgatgcatgaggctctgcacaaccactacacgcagaagagcctctccctgtctccgggtaaa

SEQ ID NO: 2186 - DNA, 1353 bp, synthetic construct; identical to SEQ ID NO: 2184
  source 1..1353: mol_type = other DNA

SEQ ID NO: 2187 - DNA, 1353 bp, synthetic construct
  source 1..1353: mol_type = other DNA
caggtgcagttggtggagtctgggggaggcgtggtccagcctgggaggtccctgagactctcctgtgcagcgtctggattcaccttcagtagctatggcatacactgggtccgccaggctccaggcaaggggctggagtgggtggcagttatatggtatgatgcaagtaataagttccatgcagacgccgtgaagggccgattcaccatctccagagacaattccaagaacacgctgtatctgcaaatgaacagcctgagagccgaggactcggctatgtacttctgtgcgagaggaaaagtggctggtatgcctgaagcttttgaaatctggggccaagggacattggtcaccgtctcttcagcctccaccaagggcccatcggtcttccccctggcaccctcctccaagagcacctctgggggcacagcggccctgggctgcctggtcaaggactacttccccgaaccggtgacggtgtcgtggaactcaggcgccctgaccagcggcgtgcacaccttcccggctgtcctacagtcctcaggactctactccctcagcagcgtggtgaccgtgccctccagcagcttgggcacccagacctacatctgcaacgtgaatcacaagcccagcaacaccaaggtggacaagaaagttgagcccaaatcttgtgacaaaactcacacatgcccaccgtgcccagcacctgaactcctggggggaccgtcagtcttcctcttccccccaaaacccaaggacaccctcatgatctcccggacccctgaggtcacatgcgtggtggtggacgtgagccacgaagaccctgaggtcaagttcaactggtacgtggacggcgtggaggtgcataatgccaagacaaagccgtgtgaggagcagtacggcagcacgtaccgttgtgtcagcgtcctcaccgtcctgcaccaggactggctgaatggcaaggagtacaagtgcaaggtctccaacaaagccctcccagcccccatcgagaaaaccatctccaaagccaaagggcagccccgagaaccacaggtgtacaccctgcccccatcccgggaggagatgaccaagaaccaggtcagcctgacctgcctggtcaaaggcttctatcccagcgacatcgccgtggagtgggagagcaatgggcagccggagaacaactacaagaccacgcctcccgtgctggactccgacggctccttcttcctctatagcaagctcaccgtggacaagagcaggtggcagcaggggaacgtcttctcatgctccgtgatgcatgaggctctgcacaaccactacacgcagaagagcctctccctgtctccgggtaaa

SEQ ID NO: 2188 - DNA, 1353 bp, synthetic construct
  source 1..1353: mol_type = other DNA
caggtgcagttggtggagtctgggggaggcgtggtccagcctgggaggtccctgagactctcctgtgcagcgtctggattcaccttcagtagctatggcatacactgggtccgccaggctccaggcaaggggctggagtgggtggcagttatatggtatgatgcaagtaataagttccatgcagactccgtgaagggccgattcaccatctccagagacaattccaagaacacgctgtatctgcaaatgaacagcctgagagccgaggactcggctatgtacttctgtgcgagaggaaaagtggctggtatgcctgaagcttttgaaatctggggccaagggacaaaggtcaccgtctcttcagcctccaccaagggcccatcggtcttccccctggcaccctcctccaagagcacctctgggggcacagcggccctgggctgcctggtcaaggactacttccccgaaccggtgacggtgtcgtggaactcaggcgccctgaccagcggcgtgcacaccttcccggctgtcctacagtcctcaggactctactccctcagcagcgtggtgaccgtgccctccagcagcttgggcacccagacctacatctgcaacgtgaatcacaagcccagcaacaccaaggtggacaagaaagttgagcccaaatcttgtgacaaaactcacacatgcccaccgtgcccagcacctgaactcctggggggaccgtcagtcttcctcttccccccaaaacccaaggacaccctcatgatctcccggacccctgaggtcacatgcgtggtggtggacgtgagccacgaagaccctgaggtcaagttcaactggtacgtggacggcgtggaggtgcataatgccaagacaaagccgtgtgaggagcagtacggcagcacgtaccgttgtgtcagcgtcctcaccgtcctgcaccaggactggctgaatggcaaggagtacaagtgcaaggtctccaacaaagccctcccagcccccatcgagaaaaccatctccaaagccaaagggcagccccgagaaccacaggtgtacaccctgcccccatcccgggaggagatgaccaagaaccaggtcagcctgacctgcctggtcaaaggcttctatcccagcgacatcgccgtggagtgggagagcaatgggcagccggagaacaactacaagaccacgcctcccgtgctggactccgacggctccttcttcctctatagcaagctcaccgtggacaagagcaggtggcagcaggggaacgtcttctcatgctccgtgatgcatgaggctctgcacaaccactacacgcagaagagcctctccctgtctccgggtaaa

SEQ ID NO: 2189 - DNA, 1353 bp, synthetic construct
  source 1..1353: mol_type = other DNA
caggtgcagttggtggagtctgggggaggcgtggtccagcctgggaggtccctgagactctcctgtgcagcgtctggattcaccttcagtagctatggcatacactgggtccgccaggctccaggcaaggggctggagtgggtggcagttatatggtatgatggaagtaataagttccatgcagacgccgtgaagggccgattcaccatctccagagacaattccaagaacacgctgtatctgcaaatgaacagcctgagagccgaggactcggctatgtacttctgtgcgagaggaaaagtggctggtatgcctgaagcttttgaaatctggggccaagggacaaaggtcaccgtctcttcagcctccaccaagggcccatcggtcttccccctggcaccctcctccaagagcacctctgggggcacagcggccctgggctgcctggtcaaggactacttccccgaaccggtgacggtgtcgtggaactcaggcgccctgaccagcggcgtgcacaccttcccggctgtcctacagtcctcaggactctactccctcagcagcgtggtgaccgtgccctccagcagcttgggcacccagacctacatctgcaacgtgaatcacaagcccagcaacaccaaggtggacaagaaagttgagcccaaatcttgtgacaaaactcacacatgcccaccgtgcccagcacctgaactcctggggggaccgtcagtcttcctcttccccccaaaacccaaggacaccctcatgatctcccggacccctgaggtcacatgcgtggtggtggacgtgagccacgaagaccctgaggtcaagttcaactggtacgtggacggcgtggaggtgcataatgccaagacaaagccgtgtgaggagcagtacggcagcacgtaccgttgtgtcagcgtcctcaccgtcctgcaccaggactggctgaatggcaaggagtacaagtgcaaggtctccaacaaagccctcccagcccccatcgagaaaaccatctccaaagccaaagggcagccccgagaaccacaggtgtacaccctgcccccatcccgggaggagatgaccaagaaccaggtcagcctgacctgcctggtcaaaggcttctatcccagcgacatcgccgtggagtgggagagcaatgggcagccggagaacaactacaagaccacgcctcccgtgctggactccgacggctccttcttcctctatagcaagctcaccgtggacaagagcaggtggcagcaggggaacgtcttctcatgctccgtgatgcatgaggctctgcacaaccactacacgcagaagagcctctccctgtctccgggtaaa

SEQ ID NO: 2190 - DNA, 1377 bp, synthetic construct
  source 1..1377: mol_type = other DNA
caaatgcagctggtgcagtctggggctgaggtgaagaagcctggggcctcagtgaaggtctcctgcaaggcttctggatacaccttcaccagttatgatatcaactgggtgcgacaggccactggacaagggcttgagtggatgggatggatgaaccctaacagtggtggcacaggctatgcacagaagttccagggcagagtcaccatgaccagggacacctccataagcacagcctacatggagctgagcagcctgagatctcaggacacggccgtgtattactgtgcgagagggggtgattacgtttgggggagttatcgtccctactactactactacggtatggacgtctggggccaagggaccacggtcaccgtctcctcagcctccaccaagggcccatcggtcttccccctggcaccctcctccaagagcacctctgggggcacagcggccctgggctgcctggtcaaggactacttccccgaaccggtgacggtgtcgtggaactcaggcgccctgaccagcggcgtgcacaccttcccggctgtcctacagtcctcaggactctactccctcagcagcgtggtgaccgtgccctccagcagcttgggcacccagacctacatctgcaacgtgaatcacaagcccagcaacaccaaggtggacaagaaagttgagcccaaatcttgtgacaaaactcacacatgcccaccgtgcccagcacctgaactcctggggggaccgtcagtcttcctcttccccccaaaacccaaggacaccctcatgatctcccggacccctgaggtcacatgcgtggtggtggacgtgagccacgaagaccctgaggtcaagttcaactggtacgtggacggcgtggaggtgcataatgccaagacaaagccgtgtgaggagcagtacggcagcacgtaccgttgtgtcagcgtcctcaccgtcctgcaccaggactggctgaatggcaaggagtacaagtgcaaggtctccaacaaagccctcccagcccccatcgagaaaaccatctccaaagccaaagggcagccccgagaaccacaggtgtacaccctgcccccatcccgggaggagatgaccaagaaccaggtcagcctgacctgcctggtcaaaggcttctatcccagcgacatcgccgtggagtgggagagcaatgggcagccggagaacaactacaagaccacgcctcccgtgctggactccgacggctccttcttcctctatagcaagctcaccgtggacaagagcaggtggcagcaggggaacgtcttctcatgctccgtgatgcatgaggctctgcacaaccactacacgcagaagagcctctccctgtctccgggtaaa

SEQ ID NO: 2191 - DNA, 1377 bp, synthetic construct; identical to SEQ ID NO: 2183
  source 1..1377: mol_type = other DNA

SEQ ID NO: 2192 - DNA, 1377 bp, synthetic construct; identical to SEQ ID NO: 2190
  source 1..1377: mol_type = other DNA

SEQ ID NO: 2193 - DNA, 1377 bp, synthetic construct
  source 1..1377: mol_type = other DNA
caaatgcagctggtgcagtctggggctgaggtgaagaagcctggggcctcagtgaaggtctcctgcaaggcttctggatacaccttcaccagttatgatatcaactgggtgcgacaggcccctggacaagggcttgagtggatgggatggatgaaccctaacagtggtggcacaggctatgcacagaagttccagggcagagtcaccatgaccagggacacctccataagcacagcctacatggagctgagcagcctgagatctgacgacacggccgtgtattactgtgcgagagggggtgattacgtttgggggagttatcgtccctactactactactacggtatggacgtctggggccaagggaccacggtcaccgtctcctcagcctccaccaagggcccatcggtcttccccctggcaccctcctccaagagcacctctgggggcacagcggccctgggctgcctggtcaaggactacttccccgaaccggtgacggtgtcgtggaactcaggcgccctgaccagcggcgtgcacaccttcccggctgtcctacagtcctcaggactctactccctcagcagcgtggtgaccgtgccctccagcagcttgggcacccagacctacatctgcaacgtgaatcacaagcccagcaacaccaaggtggacaagaaagttgagcccaaatcttgtgacaaaactcacacatgcccaccgtgcccagcacctgaactcctggggggaccgtcagtcttcctcttccccccaaaacccaaggacaccctcatgatctcccggacccctgaggtcacatgcgtggtggtggacgtgagccacgaagaccctgaggtcaagttcaactggtacgtggacggcgtggaggtgcataatgccaagacaaagccgtgtgaggagcagtacggcagcacgtaccgttgtgtcagcgtcctcaccgtcctgcaccaggactggctgaatggcaaggagtacaagtgcaaggtctccaacaaagccctcccagcccccatcgagaaaaccatctccaaagccaaagggcagccccgagaaccacaggtgtacaccctgcccccatcccgggaggagatgaccaagaaccaggtcagcctgacctgcctggtcaaaggcttctatcccagcgacatcgccgtggagtgggagagcaatgggcagccggagaacaactacaagaccacgcctcccgtgctggactccgacggctccttcttcctctatagcaagctcaccgtggacaagagcaggtggcagcaggggaacgtcttctcatgctccgtgatgcatgaggctctgcacaaccactacacgcagaagagcctctccctgtctccgggtaaa

SEQ ID NO: 2194 - DNA, 1377 bp, synthetic construct; identical to SEQ ID NO: 2190
  source 1..1377: mol_type = other DNA

SEQ ID NO: 2195 - DNA, 1377 bp, synthetic construct
  source 1..1377: mol_type = other DNA
caaatgcagctggtgcagtctggggctgaggtgaagaagcctggggcctcagtgaaggtctcctgcaaggcttctggatacaccttcaccagttatgatatcaactgggtgcgacaggcccctggacaagggcttgagtggatgggatggatgaaccctaacagtggtaacacaggctatgcacagaagttccagggcagagtcaccatgaccagggacacctccataagcacagcctacatggagctgagcagcctgagatctgacgacacggccgtgtattactgtgcgagagggggtgattacgtttgggggagttatcgtccctactactactactacggtatggacgtctggggccaagggaccacggtcaccgtctcctcagcctccaccaagggcccatcggtcttccccctggcaccctcctccaagagcacctctgggggcacagcggccctgggctgcctggtcaaggactacttccccgaaccggtgacggtgtcgtggaactcaggcgccctgaccagcggcgtgcacaccttcccggctgtcctacagtcctcaggactctactccctcagcagcgtggtgaccgtgccctccagcagcttgggcacccagacctacatctgcaacgtgaatcacaagcccagcaacaccaaggtggacaagaaagttgagcccaaatcttgtgacaaaactcacacatgcccaccgtgcccagcacctgaactcctggggggaccgtcagtcttcctcttccccccaaaacccaaggacaccctcatgatctcccggacccctgaggtcacatgcgtggtggtggacgtgagccacgaagaccctgaggtcaagttcaactggtacgtggacggcgtggaggtgcataatgccaagacaaagccgtgtgaggagcagtacggcagcacgtaccgttgtgtcagcgtcctcaccgtcctgcaccaggactggctgaatggcaaggagtacaagtgcaaggtctccaacaaagccctcccagcccccatcgagaaaaccatctccaaagccaaagggcagccccgagaaccacaggtgtacaccctgcccccatcccgggaggagatgaccaagaaccaggtcagcctgacctgcctggtcaaaggcttctatcccagcgacatcgccgtggagtgggagagcaatgggcagccggagaacaactacaagaccacgcctcccgtgctggactccgacggctccttcttcctctatagcaagctcaccgtggacaagagcaggtggcagcaggggaacgtcttctcatgctccgtgatgcatgaggctctgcacaaccactacacgcagaagagcctctccctgtctccgggtaaa

SEQ ID NO: 2196 - DNA, 1377 bp, synthetic construct
  source 1..1377: mol_type = other DNA
caaatgcagctggtgcagtctggggctgaggtgaagaagcctggggcctcagtgaaggtctcctgcaaggcttctggatacaccttcaccagttatgatatcaactgggtgcgacaggccactggacaagggcttgagtggatgggatggatgaaccctaacagtggtggcacaggctatgcacagaagttccagggcagagtcaccatgaccagggacacctccataagcacagcctacatggagctgagcagcctgagatctcaggacacggccgtgtattactgtgcgagagggggtgattacgttttcgggagttatcgtccctactactactactacggtatggacgtctggggccaagggaccacggtcaccgtctcctcagcctccaccaagggcccatcggtcttccccctggcaccctcctccaagagcacctctgggggcacagcggccctgggctgcctggtcaaggactacttccccgaaccggtgacggtgtcgtggaactcaggcgccctgaccagcggcgtgcacaccttcccggctgtcctacagtcctcaggactctactccctcagcagcgtggtgaccgtgccctccagcagcttgggcacccagacctacatctgcaacgtgaatcacaagcccagcaacaccaaggtggacaagaaagttgagcccaaatcttgtgacaaaactcacacatgcccaccgtgcccagcacctgaactcctggggggaccgtcagtcttcctcttccccccaaaacccaaggacaccctcatgatctcccggacccctgaggtcacatgcgtggtggtggacgtgagccacgaagaccctgaggtcaagttcaactggtacgtggacggcgtggaggtgcataatgccaagacaaagccgtgtgaggagcagtacggcagcacgtaccgttgtgtcagcgtcctcaccgtcctgcaccaggactggctgaatggcaaggagtacaagtgcaaggtctccaacaaagccctcccagcccccatcgagaaaaccatctccaaagccaaagggcagccccgagaaccacaggtgtacaccctgcccccatcccgggaggagatgaccaagaaccaggtcagcctgacctgcctggtcaaaggcttctatcccagcgacatcgccgtggagtgggagagcaatgggcagccggagaacaactacaagaccacgcctcccgtgctggactccgacggctccttcttcctctatagcaagctcaccgtggacaagagcaggtggcagcaggggaacgtcttctcatgctccgtgatgcatgaggctctgcacaaccactacacgcagaagagcctctccctgtctccgggtaaa

SEQ ID NO: 2197 - DNA, 1377 bp, synthetic construct
  source 1..1377: mol_type = other DNA
caaatgcagctggtgcagtctggggctgaggtgaagaagcctggggcctcagtgaaggtctcctgcaaggcttctggatacaccttcaccagttatgatatcaactgggtgcgacaggcccctggacaagggcttgagtggatgggatggatgaaccctaacagtggtggcacaggctatgcacagaagttccagggcagagtcaccatgaccagggacacctccataagcacagcctacatggagctgagcagcctgagatctgacgacacggccgtgtattactgtgcgagagggggtgattacgttttcgggagttatcgtccctactactactactacggtatggacgtctggggccaagggaccacggtcaccgtctcctcagcctccaccaagggcccatcggtcttccccctggcaccctcctccaagagcacctctgggggcacagcggccctgggctgcctggtcaaggactacttccccgaaccggtgacggtgtcgtggaactcaggcgccctgaccagcggcgtgcacaccttcccggctgtcctacagtcctcaggactctactccctcagcagcgtggtgaccgtgccctccagcagcttgggcacccagacctacatctgcaacgtgaatcacaagcccagcaacaccaaggtggacaagaaagttgagcccaaatcttgtgacaaaactcacacatgcccaccgtgcccagcacctgaactcctggggggaccgtcagtcttcctcttccccccaaaacccaaggacaccctcatgatctcccggacccctgaggtcacatgcgtggtggtggacgtgagccacgaagaccctgaggtcaagttcaactggtacgtggacggcgtggaggtgcataatgccaagacaaagccgtgtgaggagcagtacggcagcacgtaccgttgtgtcagcgtcctcaccgtcctgcaccaggactggctgaatggcaaggagtacaagtgcaaggtctccaacaaagccctcccagcccccatcgagaaaaccatctccaaagccaaagggcagccccgagaaccacaggtgtacaccctgcccccatcccgggaggagatgaccaagaaccaggtcagcctgacctgcctggtcaaaggcttctatcccagcgacatcgccgtggagtgggagagcaatgggcagccggagaacaactacaagaccacgcctcccgtgctggactccgacggctccttcttcctctatagcaagctcaccgtggacaagagcaggtggcagcaggggaacgtcttctcatgctccgtgatgcatgaggctctgcacaaccactacacgcagaagagcctctccctgtctccgggtaaa

SEQ ID NO: 2198 - DNA, 1353 bp, synthetic construct; identical to SEQ ID NO: 2187
  source 1..1353: mol_type = other DNA

SEQ ID NO: 2199 - DNA, 39 bp, synthetic construct
  source 1..39: mol_type = other DNA
tctggaagtagctccaacatcggaagtaatactgtaaac

SEQ ID NO: 2200 - DNA, 33 bp, synthetic construct
  source 1..33: mol_type = other DNA
cgggcaagtcaggacattagagattatttaggc

SEQ ID NO: 2201 - DNA, 33 bp, synthetic construct; identical to SEQ ID NO: 2200
  source 1..33: mol_type = other DNA

SEQ ID NO: 2202 - DNA, 33 bp, synthetic construct
  source 1..33: mol_type = other DNA
caggcgagtcaggacattagcaactatttaaat

SEQ ID NO: 2203 - DNA, 51 bp, synthetic construct
  source 1..51: mol_type = other DNA
aagtccagccagagtgttttatccagctccaacaataagaactacatagct

SEQ ID NO: 2204 - DNA, 51 bp, synthetic construct; identical to SEQ ID NO: 2203
  source 1..51: mol_type = other DNA

SEQ ID NO: 2205 - DNA, 51 bp, synthetic construct
  source 1..51: mol_type = other DNA
aagtccagccagagtgttttatccagctccaacaataagaactacttagct

SEQ ID NO: 2206 - DNA, 51 bp, synthetic construct; identical to SEQ ID NO: 2205
  source 1..51: mol_type = other DNA

SEQ ID NO: 2207 - DNA, 36 bp, synthetic construct
  source 1..36: mol_type = other DNA
agggccagtcagagtattagttacagttacttagcc

SEQ ID NO: 2208 - DNA, 33 bp, synthetic construct
  source 1..33: mol_type = other DNA
agggccagtcagagtgttagcagcaacttagcc

SEQ ID NO: 2209 - DNA, 33 bp, synthetic construct
  source 1..33: mol_type = other DNA
cgggcaagtcagggcattagaaatgagttaggc

SEQ ID NO: 2210 - DNA, 33 bp, synthetic construct
  source 1..33: mol_type = other DNA
caggcgagtcaggacattaccaactatttaaat

SEQ ID NO: 2211 - DNA, 33 bp, synthetic construct
  source 1..33: mol_type = other DNA
cgggcgagtcagggtcttatcatctggttagcc

SEQ ID NO: 2212 - DNA, 33 bp, synthetic construct; identical to SEQ ID NO: 2211
  source 1..33: mol_type = other DNA

SEQ ID NO: 2213 - DNA, 33 bp, synthetic construct; identical to SEQ ID NO: 2209
  source 1..33: mol_type = other DNA

SEQ ID NO: 2214 - DNA, 33 bp, synthetic construct; identical to SEQ ID NO: 2209
  source 1..33: mol_type = other DNA

SEQ ID NO: 2215 - DNA, 33 bp, synthetic construct; identical to SEQ ID NO: 2209
  source 1..33: mol_type = other DNA

SEQ ID NO: 2216 - DNA, 33 bp, synthetic construct; identical to SEQ ID NO: 2209
  source 1..33: mol_type = other DNA

SEQ ID NO: 2217 - DNA, 33 bp, synthetic construct; identical to SEQ ID NO: 2209
  source 1..33: mol_type = other DNA

SEQ ID NO: 2218 - DNA, 33 bp, synthetic construct; identical to SEQ ID NO: 2209
  source 1..33: mol_type = other DNA

SEQ ID NO: 2219 - DNA, 33 bp, synthetic construct; identical to SEQ ID NO: 2200
  source 1..33: mol_type = other DNA

SEQ ID NO: 2220 - DNA, 33 bp, synthetic construct; identical to SEQ ID NO: 2200
  source 1..33: mol_type = other DNA

SEQ ID NO: 2221 - DNA, 33 bp, synthetic construct; identical to SEQ ID NO: 2200
  source 1..33: mol_type = other DNA

SEQ ID NO: 2222 - DNA, 33 bp, synthetic construct; identical to SEQ ID NO: 2200
  source 1..33: mol_type = other DNA

SEQ ID NO: 2223 - DNA, 33 bp, synthetic construct; identical to SEQ ID NO: 2200
  source 1..33: mol_type = other DNA

SEQ ID NO: 2224 - DNA, 33 bp, synthetic construct; identical to SEQ ID NO: 2200
  source 1..33: mol_type = other DNA

SEQ ID NO: 2225 - DNA, 33 bp, synthetic construct; identical to SEQ ID NO: 2200
  source 1..33: mol_type = other DNA

SEQ ID NO: 2226 - DNA, 33 bp, synthetic construct
  source 1..33: mol_type = other DNA
cgggcaagtcaggaccttagaaattatttaggc

SEQ ID NO: 2227 - DNA, 33 bp, synthetic construct; identical to SEQ ID NO: 2226
  source 1..33: mol_type = other DNA

SEQ ID NO: 2228 - DNA, 33 bp, synthetic construct; identical to SEQ ID NO: 2226
  source 1..33: mol_type = other DNA

SEQ ID NO: 2229 - DNA, 33 bp, synthetic construct; identical to SEQ ID NO: 2226
  source 1..33: mol_type = other DNA

SEQ ID NO: 2230 - DNA, 33 bp, synthetic construct; identical to SEQ ID NO: 2226
  source 1..33: mol_type = other DNA

SEQ ID NO: 2231 - DNA, 33 bp, synthetic construct; identical to SEQ ID NO: 2226
  source 1..33: mol_type = other DNA

SEQ ID NO: 2232 - DNA, 33 bp, synthetic construct; identical to SEQ ID NO: 2226
  source 1..33: mol_type = other DNA

SEQ ID NO: 2233 - DNA, 33 bp, synthetic construct; identical to SEQ ID NO: 2226
  source 1..33: mol_type = other DNA

SEQ ID NO: 2234 - DNA, 33 bp, synthetic construct; identical to SEQ ID NO: 2226
  source 1..33: mol_type = other DNA

SEQ ID NO: 2235 - DNA, 33 bp, synthetic construct; identical to SEQ ID NO: 2226
  source 1..33: mol_type = other DNA

SEQ ID NO: 2236 - DNA, 33 bp, synthetic construct; identical to SEQ ID NO: 2226
  source 1..33: mol_type = other DNA

SEQ ID NO: 2237 - DNA, 33 bp, synthetic construct; identical to SEQ ID NO: 2226
  source 1..33: mol_type = other DNA

SEQ ID NO: 2238 - DNA, 33 bp, synthetic construct; identical to SEQ ID NO: 2202
  source 1..33: mol_type = other DNA

SEQ ID NO: 2239 - DNA, 33 bp, synthetic construct; identical to SEQ ID NO: 2202
  source 1..33: mol_type = other DNA

SEQ ID NO: 2240 - DNA, 33 bp, synthetic construct; identical to SEQ ID NO: 2202
  source 1..33: mol_type = other DNA

SEQ ID NO: 2241 - DNA, 33 bp, synthetic construct; identical to SEQ ID NO: 2202
  source 1..33: mol_type = other DNA

SEQ ID NO: 2242 - DNA, 33 bp, synthetic construct; identical to SEQ ID NO: 2202
  source 1..33: mol_type = other DNA

SEQ ID NO: 2243 - DNA, 33 bp, synthetic construct; identical to SEQ ID NO: 2202
  source 1..33: mol_type = other DNA

SEQ ID NO: 2244 - DNA, 33 bp, synthetic construct; identical to SEQ ID NO: 2202
  source 1..33: mol_type = other DNA

SEQ ID NO: 2245 - DNA, 33 bp, synthetic construct; identical to SEQ ID NO: 2202
  source 1..33: mol_type = other DNA

SEQ ID NO: 2246 - DNA, 33 bp, synthetic construct; identical to SEQ ID NO: 2202
  source 1..33: mol_type = other DNA

SEQ ID NO: 2247 - DNA, 33 bp, synthetic construct; identical to SEQ ID NO: 2200
  source 1..33: mol_type = other DNA

SEQ ID NO: 2248 - DNA, 33 bp, synthetic construct; identical to SEQ ID NO: 2200
  source 1..33: mol_type = other DNA

SEQ ID NO: 2249 - DNA, 33 bp, synthetic construct; identical to SEQ ID NO: 2200
  source 1..33: mol_type = other DNA

SEQ ID NO: 2250 - DNA, 33 bp, synthetic construct; identical to SEQ ID NO: 2200
  source 1..33: mol_type = other DNA

SEQ ID NO: 2251 - DNA, 33 bp, synthetic construct; identical to SEQ ID NO: 2200
  source 1..33: mol_type = other DNA

SEQ ID NO: 2252 - DNA, 33 bp, synthetic construct; identical to SEQ ID NO: 2200
  source 1..33: mol_type = other DNA

SEQ ID NO: 2253 - DNA, 33 bp, synthetic construct; identical to SEQ ID NO: 2200
  source 1..33: mol_type = other DNA

SEQ ID NO: 2254 - DNA, 33 bp, synthetic construct; identical to SEQ ID NO: 2210
  source 1..33: mol_type = other DNA

SEQ ID NO: 2255 - DNA, 33 bp, synthetic construct; identical to SEQ ID NO: 2210
  source 1..33: mol_type = other DNA

SEQ ID NO: 2256 - DNA, 33 bp, synthetic construct; identical to SEQ ID NO: 2210
  source 1..33: mol_type = other DNA

SEQ ID NO: 2257 - DNA, 33 bp, synthetic construct; identical to SEQ ID NO: 2210
  source 1..33: mol_type = other DNA

SEQ ID NO: 2258 - DNA, 33 bp, synthetic construct; identical to SEQ ID NO: 2210
  source 1..33: mol_type = other DNA

SEQ ID NO: 2259 - DNA, 33 bp, synthetic construct; identical to SEQ ID NO: 2210
  source 1..33: mol_type = other DNA

SEQ ID NO: 2260 - DNA, 33 bp, synthetic construct; identical to SEQ ID NO: 2210
  source 1..33: mol_type = other DNA

SEQ ID NO: 2261 - DNA, 33 bp, synthetic construct; identical to SEQ ID NO: 2210
  source 1..33: mol_type = other DNA

SEQ ID NO: 2262 - DNA, 33 bp, synthetic construct; identical to SEQ ID NO: 2210
  source 1..33: mol_type = other DNA

SEQ ID NO: 2263 - DNA, 33 bp, synthetic construct; identical to SEQ ID NO: 2210
  source 1..33: mol_type = other DNA

SEQ ID NO: 2264 - DNA, 33 bp, synthetic construct; identical to SEQ ID NO: 2210
  source 1..33: mol_type = other DNA

SEQ ID NO: 2265 - DNA, 36 bp, synthetic construct
  source 1..36: mol_type = other DNA
agggccagtcagatttttaccagcacctacttagcc

SEQ ID NO: 2266 - DNA, 36 bp, synthetic construct; identical to SEQ ID NO: 2265
  source 1..36: mol_type = other DNA

SEQ ID NO: 2267 - DNA, 36 bp, synthetic construct; identical to SEQ ID NO: 2265
  source 1..36: mol_type = other DNA

SEQ ID NO: 2268 - DNA, 36 bp, synthetic construct; identical to SEQ ID NO: 2265
  source 1..36: mol_type = other DNA

SEQ ID NO: 2269 - DNA, 33 bp, synthetic construct; identical to SEQ ID NO: 2208
  source 1..33: mol_type = other DNA

SEQ ID NO: 2270 - DNA, 33 bp, synthetic construct; identical to SEQ ID NO: 2208
  source 1..33: mol_type = other DNA

SEQ ID NO: 2271 - DNA, 33 bp, synthetic construct; identical to SEQ ID NO: 2208
  source 1..33: mol_type = other DNA

SEQ ID NO: 2272 - DNA, 33 bp, synthetic construct; identical to SEQ ID NO: 2208
  source 1..33: mol_type = other DNA

SEQ ID NO: 2273 - DNA, 33 bp, synthetic construct; identical to SEQ ID NO: 2208
  source 1..33: mol_type = other DNA

SEQ ID NO: 2274 - DNA, 33 bp, synthetic construct; identical to SEQ ID NO: 2208
  source 1..33: mol_type = other DNA

SEQ ID NO: 2275 - DNA, 33 bp, synthetic construct; identical to SEQ ID NO: 2208
  source 1..33: mol_type = other DNA

SEQ ID NO: 2276 - DNA, 33 bp, synthetic construct; identical to SEQ ID NO: 2208
  source 1..33: mol_type = other DNA

SEQ ID NO: 2277 - DNA, 36 bp, synthetic construct; identical to SEQ ID NO: 2207
  source 1..36: mol_type = other DNA

SEQ ID NO: 2278 - DNA, 36 bp, synthetic construct; identical to SEQ ID NO: 2207
  source 1..36: mol_type = other DNA

SEQ ID NO: 2279 - DNA, 36 bp, synthetic construct; identical to SEQ ID NO: 2207
  source 1..36: mol_type = other DNA

SEQ ID NO: 2280 - DNA, 36 bp, synthetic construct; identical to SEQ ID NO: 2207
  source 1..36: mol_type = other DNA

SEQ ID NO: 2281 - DNA, 36 bp, synthetic construct; identical to SEQ ID NO: 2207
  source 1..36: mol_type = other DNA

SEQ ID NO: 2282 - DNA, 36 bp, synthetic construct; identical to SEQ ID NO: 2207
  source 1..36: mol_type = other DNA

SEQ ID NO: 2283 - DNA, 36 bp, synthetic construct; identical to SEQ ID NO: 2207
  source 1..36: mol_type = other DNA

SEQ ID NO: 2284 - DNA, 51 bp, synthetic construct; identical to SEQ ID NO: 2203
  source 1..51: mol_type = other DNA

SEQ ID NO: 2285 - DNA, 51 bp, synthetic construct; identical to SEQ ID NO: 2203
  source 1..51: mol_type = other DNA

SEQ ID NO: 2286 - DNA, 51 bp, synthetic construct; identical to SEQ ID NO: 2203
  source 1..51: mol_type = other DNA

SEQ ID NO: 2287 - DNA, 51 bp, synthetic construct; identical to SEQ ID NO: 2203
  source 1..51: mol_type = other DNA

SEQ ID NO: 2288 - DNA, 51 bp, synthetic construct; identical to SEQ ID NO: 2203
  source 1..51: mol_type = other DNA

SEQ ID NO: 2289 - DNA, 51 bp, synthetic construct; identical to SEQ ID NO: 2203
  source 1..51: mol_type = other DNA

SEQ ID NO: 2290 - DNA, 51 bp, synthetic construct; identical to SEQ ID NO: 2203
  source 1..51: mol_type = other DNA

SEQ ID NO: 2291 - DNA, 51 bp, synthetic construct; identical to SEQ ID NO: 2203
  source 1..51: mol_type = other DNA

SEQ ID NO: 2292 - DNA, 51 bp, synthetic construct; identical to SEQ ID NO: 2203
  source 1..51: mol_type = other DNA

SEQ ID NO: 2293 - DNA, 51 bp, synthetic construct; identical to SEQ ID NO: 2203
  source 1..51: mol_type = other DNA

SEQ ID NO: 2294 - DNA, 51 bp, synthetic construct; identical to SEQ ID NO: 2203
  source 1..51: mol_type = other DNA

SEQ ID NO: 2295 - DNA, 51 bp, synthetic construct; identical to SEQ ID NO: 2205
  source 1..51: mol_type = other DNA

SEQ ID NO: 2296 - DNA, 51 bp, synthetic construct; identical to SEQ ID NO: 2205
  source 1..51: mol_type = other DNA

SEQ ID NO: 2297 - DNA, 51 bp, synthetic construct; identical to SEQ ID NO: 2205
  source 1..51: mol_type = other DNA

SEQ ID NO: 2298 - DNA, 51 bp, synthetic construct; identical to SEQ ID NO: 2205
  source 1..51: mol_type = other DNA

SEQ ID NO: 2299 - DNA, 51 bp, synthetic construct; identical to SEQ ID NO: 2205
  source 1..51: mol_type = other DNA

SEQ ID NO: 2300 - DNA, 51 bp, synthetic construct; identical to SEQ ID NO: 2205
  source 1..51: mol_type = other DNA

SEQ ID NO: 2301 - DNA, 51 bp, synthetic construct; identical to SEQ ID NO: 2205
  source 1..51: mol_type = other DNA

SEQ ID NO: 2302 - DNA, 51 bp, synthetic construct; identical to SEQ ID NO: 2205
  source 1..51: mol_type = other DNA

SEQ ID NO: 2303 - DNA, 51 bp, synthetic construct; identical to SEQ ID NO: 2205
  source 1..51: mol_type = other DNA

SEQ ID NO: 2304 - DNA, 51 bp, synthetic construct; identical to SEQ ID NO: 2203
  source 1..51: mol_type = other DNA

SEQ ID NO: 2305 - DNA, 51 bp, synthetic construct; identical to SEQ ID NO: 2203
  source 1..51: mol_type = other DNA

SEQ ID NO: 2306 - DNA, 51 bp, synthetic construct; identical to SEQ ID NO: 2203
  source 1..51: mol_type = other DNA

SEQ ID NO: 2307 - DNA, 51 bp, synthetic construct; identical to SEQ ID NO: 2203
  source 1..51: mol_type = other DNA

SEQ ID NO: 2308 - DNA, 51 bp, synthetic construct; identical to SEQ ID NO: 2203
  source 1..51: mol_type = other DNA

SEQ ID NO: 2309 - DNA, 51 bp, synthetic construct; identical to SEQ ID NO: 2205
  source 1..51: mol_type = other DNA

SEQ ID NO: 2310 - DNA, 51 bp, synthetic construct; identical to SEQ ID NO: 2205
  source 1..51: mol_type = other DNA

SEQ ID NO: 2311 - DNA, 51 bp, synthetic construct; identical to SEQ ID NO: 2205
  source 1..51: mol_type = other DNA

SEQ ID NO: 2312 - DNA, 51 bp, synthetic construct; identical to SEQ ID NO: 2205
  source 1..51: mol_type = other DNA

SEQ ID NO: 2313 - DNA, 51 bp, synthetic construct; identical to SEQ ID NO: 2205
  source 1..51: mol_type = other DNA

SEQ ID NO: 2314 - DNA, 51 bp, synthetic construct; identical to SEQ ID NO: 2205
  source 1..51: mol_type = other DNA

SEQ ID NO: 2315 - DNA, 51 bp, synthetic construct; identical to SEQ ID NO: 2205
  source 1..51: mol_type = other DNA

SEQ ID NO: 2316 - DNA, 51 bp, synthetic construct; identical to SEQ ID NO: 2205
  source 1..51: mol_type = other DNA

SEQ ID NO: 2317 - DNA, 51 bp, synthetic construct; identical to SEQ ID NO: 2205
  source 1..51: mol_type = other DNA

SEQ ID NO: 2318 - DNA, 51 bp, synthetic construct; identical to SEQ ID NO: 2205
  source 1..51: mol_type = other DNA

SEQ ID NO: 2319 - DNA, 51 bp, synthetic construct; identical to SEQ ID NO: 2205
  source 1..51: mol_type = other DNA

SEQ ID NO: 2320 - DNA, 51 bp, synthetic construct; identical to SEQ ID NO: 2205
  source 1..51: mol_type = other DNA

SEQ ID NO: 2321 - DNA, 51 bp, synthetic construct; identical to SEQ ID NO: 2205
  source 1..51: mol_type = other DNA

SEQ ID NO: 2322 - DNA, 39 bp, synthetic construct
  source 1..39: mol_type = other DNA
tctggaagtagctccaacatcggaagtcaaactgtaaac

SEQ ID NO: 2323 - DNA, 39 bp, synthetic construct; identical to SEQ ID NO: 2322
  source 1..39: mol_type = other DNA

SEQ ID NO: 2324 - DNA, 39 bp, synthetic construct
  source 1..39: mol_type = other DNA
tctggaagtagctccaacatcggaagtaattatgtaaac

SEQ ID NO: 2325 - DNA, 39 bp, synthetic construct; identical to SEQ ID NO: 2324
  source 1..39: mol_type = other DNA

SEQ ID NO: 2326 - DNA, 39 bp, synthetic construct; identical to SEQ ID NO: 2322
  source 1..39: mol_type = other DNA

SEQ ID NO: 2327 - DNA, 39 bp, synthetic construct; identical to SEQ ID NO: 2324
  source 1..39: mol_type = other DNA

SEQ ID NO: 2328 - DNA, 39 bp, synthetic construct; identical to SEQ ID NO: 2199
  source 1..39: mol_type = other DNA

SEQ ID NO: 2329 - DNA, 39 bp, synthetic construct; identical to SEQ ID NO: 2199
  source 1..39: mol_type = other DNA

SEQ ID NO: 2330 - DNA, 39 bp, synthetic construct; identical to SEQ ID NO: 2199
  source 1..39: mol_type = other DNA

SEQ ID NO: 2331 - DNA, 39 bp, synthetic construct; identical to SEQ ID NO: 2199
  source 1..39: mol_type = other DNA

SEQ ID NO: 2332 - DNA, 39 bp, synthetic construct; identical to SEQ ID NO: 2199
  source 1..39: mol_type = other DNA

SEQ ID NO: 2333 - DNA, 39 bp, synthetic construct; identical to SEQ ID NO: 2324
  source 1..39: mol_type = other DNA

SEQ ID NO: 2334 - DNA, 39 bp, synthetic construct; identical to SEQ ID NO: 2324
  source 1..39: mol_type = other DNA

SEQ ID NO: 2335 - DNA, 39 bp, synthetic construct; identical to SEQ ID NO: 2322
  source 1..39: mol_type = other DNA

SEQ ID NO: 2336 - DNA, 33 bp, synthetic construct; identical to SEQ ID NO: 2226
  source 1..33: mol_type = other DNA

SEQ ID NO: 2337 - DNA, 33 bp, synthetic construct; identical to SEQ ID NO: 2200
  source 1..33: mol_type = other DNA

SEQ ID NO: 2338 - DNA, 39 bp, synthetic construct; identical to SEQ ID NO: 2199
  source 1..39: mol_type = other DNA

SEQ ID NO: 2339 - DNA, 33 bp, synthetic construct
  source 1..33: mol_type = other DNA
cgggcaagtcagaccattagcaggtttttaaat

SEQ ID NO: 2340 - DNA, 39 bp, synthetic construct
  source 1..39: mol_type = other DNA
tctggaagcagctccaacattggaaataattatgtatcc

SEQ ID NO: 2341 - DNA, 33 bp, synthetic construct; identical to SEQ ID NO: 2339
  source 1..33: mol_type = other DNA

SEQ ID NO: 2342 - DNA, 33 bp, synthetic construct; identical to SEQ ID NO: 2339
  source 1..33: mol_type = other DNA

SEQ ID NO: 2343 - DNA, 33 bp, synthetic construct; identical to SEQ ID NO: 2339
  source 1..33: mol_type = other DNA

SEQ ID NO: 2344 - DNA, 33 bp, synthetic construct; identical to SEQ ID NO: 2339
  source 1..33: mol_type = other DNA

SEQ ID NO: 2345 - DNA, 33 bp, synthetic construct; identical to SEQ ID NO: 2339
  source 1..33: mol_type = other DNA

SEQ ID NO: 2346 - DNA, 33 bp, synthetic construct; identical to SEQ ID NO: 2339
  source 1..33: mol_type = other DNA

SEQ ID NO: 2347 - DNA, 39 bp, synthetic construct; identical to SEQ ID NO: 2340
  source 1..39: mol_type = other DNA

SEQ ID NO: 2348 - DNA, 39 bp, synthetic construct; identical to SEQ ID NO: 2340
  source 1..39: mol_type = other DNA

SEQ ID NO: 2349 - DNA, 39 bp, synthetic construct; identical to SEQ ID NO: 2340
  source 1..39: mol_type = other DNA

SEQ ID NO: 2350 - DNA, 39 bp, synthetic construct; identical to SEQ ID NO: 2340
  source 1..39: mol_type = other DNA

SEQ ID NO: 2351 - DNA, 39 bp, synthetic construct; identical to SEQ ID NO: 2340
  source 1..39: mol_type = other DNA

SEQ ID NO: 2352 - DNA, 39 bp, synthetic construct; identical to SEQ ID NO: 2340
  source 1..39: mol_type = other DNA

SEQ ID NO: 2353 - DNA, 39 bp, synthetic construct; identical to SEQ ID NO: 2340
  source 1..39: mol_type = other DNA

SEQ ID NO: 2354 - DNA, 39 bp, synthetic construct; identical to SEQ ID NO: 2340
  source 1..39: mol_type = other DNA

SEQ ID NO: 2355 - DNA, 33 bp, synthetic construct; identical to SEQ ID NO: 2339
  source 1..33: mol_type = other DNA

SEQ ID NO: 2356 - DNA, 21 bp, synthetic construct
  source 1..21: mol_type = other DNA
actaataatcagcggccctca

SEQ ID NO: 2357 - DNA, 21 bp, synthetic construct
  source 1..21: mol_type = other DNA
ggtgcatccagtttgcaaagt

SEQ ID NO: 2358 - DNA, 21 bp, synthetic construct
  source 1..21: mol_type = other DNA
ggtgcatccagtttgcaaagt

SEQ ID NO: 2359 - DNA, 21 bp, synthetic construct
  source 1..21: mol_type = other DNA
gatgcatccaatttggaaaca

SEQ ID NO: 2360 - DNA, 21 bp, synthetic construct
  source 1..21: mol_type = other DNA
tgggcatctacccgggaatcc

SEQ ID NO: 2361 - DNA, 21 bp, synthetic construct
  source 1..21: mol_type = other DNA
tgggcatctacccgggaatcc

SEQ ID NO: 2362 - DNA, 21 bp, synthetic construct
  source 1..21: mol_type = other DNA
tggacttctacccgagattcc

SEQ ID NO: 2363 - DNA, 21 bp, synthetic construct
  source 1..21: mol_type = other DNA
tggacttctacccgagattcc

SEQ ID NO: 2364 - DNA, 21 bp, synthetic construct
  source 1..21: mol_type = other DNA
ggtgcatccagcagggccact

SEQ ID NO: 2365 - DNA, 21 bp, synthetic construct
  source 1..21: mol_type = other DNA
ggtgcagccaccagggccact

SEQ ID NO: 2366 - DNA, 21 bp, synthetic construct
  source 1..21: mol_type = other DNA
ggtgcatccagtttgcaaagt

SEQ ID NO: 2367 - DNA, 21 bp, synthetic construct
  source 1..21: mol_type = other DNA
gatgcttccaatttggagcca

SEQ ID NO: 2368 - DNA, 21 bp, synthetic construct
  source 1..21: mol_type = other DNA
gctgcatccagtttgcaaagt

SEQ ID NO: 2369 - DNA, 21 bp, synthetic construct
  source 1..21: mol_type = other DNA
gctgcatccagtttgcaaagt

SEQ ID NO: 2370 - DNA, 21 bp, synthetic construct
  source 1..21: mol_type = other DNA
ggtgcatccagtttgcaaagt

SEQ ID NO: 2371 - DNA, 21 bp, synthetic construct
  source 1..21: mol_type = other DNA
ggtgcatccagtttgcaaagt

SEQ ID NO: 2372 - DNA, 21 bp, synthetic construct
  source 1..21: mol_type = other DNA
ggtgcatccagtttgcaaagt

SEQ ID NO: 2373 - DNA, 21 bp, synthetic construct
  source 1..21: mol_type = other DNA
ggtgcatccagtttgcaaagt

SEQ ID NO: 2374 - DNA, 21 bp, synthetic construct
  source 1..21: mol_type = other DNA
ggtgcatccagtttgcaaagt

SEQ ID NO: 2375 - DNA, 21 bp, synthetic construct
  source 1..21: mol_type = other DNA
ggtgcatccagtttgcaaagt

SEQ ID NO: 2376 - DNA, 21 bp, synthetic construct
  source 1..21: mol_type = other DNA
ggtgcatccagtttgcaaagt

SEQ ID NO: 2377 - DNA, 21 bp, synthetic construct
  source 1..21: mol_type = other DNA
ggtgcatccagtttgcaaagt

SEQ ID NO: 2378 - DNA, 21 bp, synthetic construct
  source 1..21: mol_type = other DNA
ggtgcatccagtttgcaaagt

SEQ ID NO: 2379 - DNA, 21 bp, synthetic construct
  source 1..21: mol_type = other DNA
ggtgcatccagtttgcaaagt

SEQ ID NO: 2380 - DNA, 21 bp, synthetic construct
  source 1..21: mol_type = other DNA
ggtgcatccagtttgcaaagt

SEQ ID NO: 2381 - DNA, 21 bp, synthetic construct
  source 1..21: mol_type = other DNA
ggtgcatccagtttgcaaagt

SEQ ID NO: 2382 - DNA, 21 bp, synthetic construct
  source 1..21: mol_type = other DNA
ggtgcatccagtttgcaaagt

SEQ ID NO: 2383 - DNA, 21 bp, synthetic construct
  source 1..21: mol_type = other DNA
ggtgcatccagtttgcaaagt

SEQ ID NO: 2384 - DNA, 21 bp, synthetic construct
  source 1..21: mol_type = other DNA
ggtgcatccagtttgcaaagt

SEQ ID NO: 2385 - DNA, 21 bp, synthetic construct
  source 1..21: mol_type = other DNA
ggtgcatccagtttgcaaagt

SEQ ID NO: 2386 - DNA, 21 bp, synthetic construct
  source 1..21: mol_type = other DNA
ggtgcatccagtttgcaaagt

SEQ ID NO: 2387 - DNA, 21 bp, synthetic construct
  source 1..21: mol_type = other DNA
ggtgcatccagtttgcaaagt

SEQ ID NO: 2388 - DNA, 21 bp, synthetic construct
  source 1..21: mol_type = other DNA
ggtgcatccagtttgcaaagt

SEQ ID NO: 2389 - DNA, 21 bp, synthetic construct
  source 1..21: mol_type = other DNA
ggtgcatccagtttgcaaagt

SEQ ID NO: 2390 - DNA, 21 bp, synthetic construct
  source 1..21: mol_type = other DNA
ggtgcatccagtttgcaaagt

SEQ ID NO: 2391 - DNA, 21 bp, synthetic construct
  source 1..21: mol_type = other DNA
ggtgcatccagtttgcaaagt

SEQ ID NO: 2392 - DNA, 21 bp, synthetic construct
  source 1..21: mol_type = other DNA
ggtgcatccagtttgcaaagt

SEQ ID NO: 2393 - DNA, 21 bp, synthetic construct
  source 1..21: mol_type = other DNA
ggtgcatccagtttgcaaagt

SEQ ID NO: 2394 - DNA, 21 bp, synthetic construct
  source 1..21: mol_type = other DNA
ggtgcatccagtttgcaaagt

SEQ ID NO: 2395 - DNA, 21 bp, synthetic construct
  source 1..21: mol_type = other DNA
gatgcatccaatttggaaaca

SEQ ID NO: 2396 - DNA, 21 bp, synthetic construct
  source 1..21: mol_type = other DNA
gatgcatccaatttggaaaca

SEQ ID NO: 2397 - DNA, 21 bp, synthetic construct
  source 1..21: mol_type = other DNA
gatgcatccaatttggaaaca

SEQ ID NO: 2398 - DNA, 21 bp, synthetic construct
  source 1..21: mol_type = other DNA
gatgcatccaatttggaaaca

SEQ ID NO: 2399 - DNA, 21 bp, synthetic construct
  source 1..21: mol_type = other DNA
gatgcatccaatttggaaaca

SEQ ID NO: 2400 - DNA, 21 bp, synthetic construct
  source 1..21: mol_type = other DNA
gatgcatccaatttggaaaca

SEQ ID NO: 2401 - DNA, 21 bp, synthetic construct
  source 1..21: mol_type = other DNA
gatgcatccaatttggaaaca

SEQ ID NO: 2402 - DNA, 21 bp, synthetic construct
  source 1..21: mol_type = other DNA
gatgcatccaatttggaaaca

SEQ ID NO: 2403 - DNA, 21 bp, synthetic construct
  source 1..21: mol_type = other DNA
gatgcatccaatttggaaaca

SEQ ID NO: 2404 - DNA, 21 bp, synthetic construct
  source 1..21: mol_type = other DNA
ggtgcatccagtttgcaaagt

SEQ ID NO: 2405 - DNA, 21 bp, synthetic construct
  source 1..21: mol_type = other DNA
ggtgcatccagtttgcaaagt

SEQ ID NO: 2406 - DNA, 21 bp, synthetic construct
  source 1..21: mol_type = other DNA
ggtgcatccagtttgcaaagt

SEQ ID NO: 2407 - DNA, 21 bp, synthetic construct
  source 1..21: mol_type = other DNA
ggtgcatccagtttgcaaagt

SEQ ID NO: 2408 - DNA, 21 bp, synthetic construct
  source 1..21: mol_type = other DNA
ggtgcatccagtttgcaaagt

SEQ ID NO: 2409 - DNA, 21 bp, synthetic construct
  source 1..21: mol_type = other DNA
ggtgcatccagtttgcaaagt

SEQ ID NO: 2410 - DNA, 21 bp, synthetic construct
  source 1..21: mol_type = other DNA
ggtgcatccagtttgcaaagt

SEQ ID NO: 2411 - DNA, 21 bp, synthetic construct
  source 1..21: mol_type = other DNA
gatgcttccaatttggagcca

SEQ ID NO: 2412 - DNA, 21 bp, synthetic construct
  source 1..21: mol_type = other DNA
gatgcttccaatttggagcca

SEQ ID NO: 2413 - DNA, 21 bp, synthetic construct
  source 1..21: mol_type = other DNA
gatgcttccaatttggagcca

SEQ ID NO: 2414 - DNA, 21 bp, synthetic construct
  source 1..21: mol_type = other DNA
gatgcttccaatttggagcca

SEQ ID NO: 2415 - DNA, 21 bp, synthetic construct
  source 1..21: mol_type = other DNA
gatgcttccaatttggagcca

SEQ ID NO: 2416 - DNA, 21 bp, synthetic construct
  source 1..21: mol_type = other DNA
gatgcttccaatttggagcca

SEQ ID NO: 2417 - DNA, 21 bp, synthetic construct
  source 1..21: mol_type = other DNA
gatgcttccaatttggagcca

SEQ ID NO: 2418 - DNA, 21 bp, synthetic construct
  source 1..21: mol_type = other DNA
gatgcttccaatttggagcca

SEQ ID NO: 2419 - DNA, 21 bp, synthetic construct
  source 1..21: mol_type = other DNA
gatgcttccaatttggagcca

SEQ ID NO: 2420 - DNA, 21 bp, synthetic construct
  source 1..21: mol_type = other DNA
gatgcttccaatttggagcca

SEQ ID NO: 2421 - DNA, 21 bp, synthetic construct
  source 1..21: mol_type = other DNA
gatgcttccaatttggagcca

SEQ ID NO: 2422 - DNA, 21 bp, synthetic construct
  source 1..21: mol_type = other DNA
ggtgcatccagcagggccact

SEQ ID NO: 2423 - DNA, 21 bp, synthetic construct
  source 1..21: mol_type = other DNA
ggtgcatccagcagggccact

SEQ ID NO: 2424 - DNA, 21 bp, synthetic construct
  source 1..21: mol_type = other DNA
ggtgcatccagcagggccact

SEQ ID NO: 2425 - DNA, 21 bp, synthetic construct
  source 1..21: mol_type = other DNA
ggtgcatccagcagggccact

SEQ ID NO: 2426 - DNA, 21 bp, synthetic construct
  source 1..21: mol_type = other DNA
ggtgcagccaccagggccact

SEQ ID NO: 2427 - DNA, 21 bp, synthetic construct
  source 1..21: mol_type = other DNA
ggtgcagccaccagggccact

SEQ ID NO: 2428 - DNA, 21 bp, synthetic construct
  source 1..21: mol_type = other DNA
ggtgcagccaccagggccact

SEQ ID NO: 2429 - DNA, 21 bp, synthetic construct
  source 1..21: mol_type = other DNA
ggtgcagccaccagggccact

SEQ ID NO: 2430 - DNA, 21 bp, synthetic construct
  source 1..21: mol_type = other DNA
ggtgcagccaccagggccact

SEQ ID NO: 2431 - DNA, 21 bp, synthetic construct
  source 1..21: mol_type = other DNA
ggtgcagccaccagggccact

SEQ ID NO: 2432 - DNA, 21 bp, synthetic construct
  source 1..21: mol_type = other DNA
ggtgcagccaccagggccact

SEQ ID NO: 2433 - DNA, 21 bp, synthetic construct
  source 1..21: mol_type = other DNA
ggtgcagccaccagggccact

SEQ ID NO: 2434 - DNA, 21 bp, synthetic construct
  source 1..21: mol_type = other DNA
ggtgcatccagcagggccact

SEQ ID NO: 2435 - DNA, 21 bp, synthetic construct
  source 1..21: mol_type = other DNA
ggtgcatccagcagggccact

SEQ ID NO: 2436 - DNA, 21 bp, synthetic construct
  source 1..21: mol_type = other DNA
ggtgcatccagcagggccact

SEQ ID NO: 2437 - DNA, 21 bp, synthetic construct
  source 1..21: mol_type = other DNA
ggtgcatccagcagggccact

SEQ ID NO: 2438 - DNA, 21 bp, synthetic construct
  source 1..21: mol_type = other DNA
ggtgcatccagcagggccact

SEQ ID NO: 2439 - DNA, 21 bp, synthetic construct
  source 1..21: mol_type = other DNA
ggtgcatccagcagggccact

SEQ ID NO: 2440 - DNA, 21 bp, synthetic construct
  source 1..21: mol_type = other DNA
ggtgcatccagcagggccact

SEQ ID NO: 2441 - DNA, 21 bp, synthetic construct
  source 1..21: mol_type = other DNA
tgggcatctacccgggaatcc

SEQ ID NO: 2442 - DNA, 21 bp, synthetic construct
  source 1..21: mol_type = other DNA
tgggcatctacccgggaatcc

SEQ ID NO: 2443 - DNA, 21 bp, synthetic construct
  source 1..21: mol_type = other DNA
tgggcatctacccgggaatcc

SEQ ID NO: 2444 - DNA, 21 bp, synthetic construct
  source 1..21: mol_type = other DNA
tgggcatctacccgggaatcc

SEQ ID NO: 2445 - DNA, 21 bp, synthetic construct
  source 1..21: mol_type = other DNA
tgggcatctacccgggaatcc

SEQ ID NO: 2446 - DNA, 21 bp, synthetic construct
  source 1..21: mol_type = other DNA
tgggcatctacccgggaatcc

SEQ ID NO: 2447 - DNA, 21 bp, synthetic construct
  source 1..21: mol_type = other DNA
tgggcatctacccgggaatcc

SEQ ID NO: 2448 - DNA, 21 bp, synthetic construct
  source 1..21: mol_type = other DNA
tgggcatctacccgggaatcc

SEQ ID NO: 2449 - DNA, 21 bp, synthetic construct
  source 1..21: mol_type = other DNA
tgggcatctacccgggaatcc

SEQ ID NO: 2450 - DNA, 21 bp, synthetic construct
  source 1..21: mol_type = other DNA
tgggcatctacccgggaatcc

SEQ ID NO: 2451 - DNA, 21 bp, synthetic construct
  source 1..21: mol_type = other DNA
tgggcatctacccgggaatcc

SEQ ID NO: 2452 - DNA, 21 bp, synthetic construct
  source 1..21: mol_type = other DNA
tggacttctacccgagaatcc

SEQ ID NO: 2453 - DNA, 21 bp, synthetic construct
  source 1..21: mol_type = other DNA
tggacttctacccgagaatcc

SEQ ID NO: 2454 - DNA, 21 bp, synthetic construct
  source 1..21: mol_type = other DNA
tggacttctacccgagattcc

SEQ ID NO: 2455 - DNA, 21 bp, synthetic construct
  source 1..21: mol_type = other DNA
tggacttctacccgagaatcc

SEQ ID NO: 2456 - DNA, 21 bp, synthetic construct
  source 1..21: mol_type = other DNA
tggacttctacccgagaatcc

SEQ ID NO: 2457 - DNA, 21 bp, synthetic construct
  source 1..21: mol_type = other DNA
tggacttctacccgagattcc

SEQ ID NO: 2458 - DNA, 21 bp, synthetic construct
  source 1..21: mol_type = other DNA
tggacttctacccgagattcc

SEQ ID NO: 2459 - DNA, 21 bp, synthetic construct
  source 1..21: mol_type = other DNA
tggacttctacccgagaatcc

SEQ ID NO: 2460 - DNA, 21 bp, synthetic construct
  source 1..21: mol_type = other DNA
tggacttctacccgagaatcc

SEQ ID NO: 2461 - DNA, 21 bp, synthetic construct
  source 1..21: mol_type = other DNA
tgggcatctacccgggaatcc

SEQ ID NO: 2462 - DNA, 21 bp, synthetic construct
  source 1..21: mol_type = other DNA
tgggcatctacccgggaatcc

SEQ ID NO: 2463 - DNA, 21 bp, synthetic construct
  source 1..21: mol_type = other DNA
tgggcatctacccgggaatcc

SEQ ID NO: 2464 - DNA, 21 bp, synthetic construct
  source 1..21: mol_type = other DNA
tgggcatctacccgggaatcc

SEQ ID NO: 2465 - DNA, 21 bp, synthetic construct
  source 1..21: mol_type = other DNA
tgggcatctacccgggaatcc

SEQ ID NO: 2466 - DNA, 21 bp, synthetic construct
  source 1..21: mol_type = other DNA
tggacttctacccgagattcc

SEQ ID NO: 2467 - DNA, 21 bp, synthetic construct
  source 1..21: mol_type = other DNA
tggacttctacccgagattcc

SEQ ID NO: 2468 - DNA, 21 bp, synthetic construct
  source 1..21: mol_type = other DNA
tggacttctacccgagattcc

SEQ ID NO: 2469 - DNA, 21 bp, synthetic construct
  source 1..21: mol_type = other DNA
tggacttctacccgagattcc

SEQ ID NO: 2470 - DNA, 21 bp, synthetic construct
  source 1..21: mol_type = other DNA
tggacttctacccgagattcc

SEQ ID NO: 2471 - DNA, 21 bp, synthetic construct
  source 1..21: mol_type = other DNA
tggacttctacccgagattcc

SEQ ID NO: 2472 - DNA, 21 bp, synthetic construct
  source 1..21: mol_type = other DNA
tggacttctacccgagattcc

SEQ ID NO: 2473 - DNA, 21 bp, synthetic construct
  source 1..21: mol_type = other DNA
tggacttctacccgagaatcc

SEQ ID NO: 2474 - DNA, 21 bp, synthetic construct
  source 1..21: mol_type = other DNA
tggacttctacccgagaatcc

SEQ ID NO: 2475 - DNA, 21 bp, synthetic construct
  source 1..21: mol_type = other DNA
tggacttctacccgagaatcc

SEQ ID NO: 2476 - DNA, 21 bp, synthetic construct
  source 1..21: mol_type = other DNA
tggacttctacccgagaatcc

SEQ ID NO: 2477 - DNA, 21 bp, synthetic construct
  source 1..21: mol_type = other DNA
tggacttctacccgagattcc

SEQ ID NO: 2478 - DNA, 21 bp, synthetic construct
  source 1..21: mol_type = other DNA
tggacttctacccgagaatcc

SEQ ID NO: 2479 - DNA, 21 bp, synthetic construct
  source 1..21: mol_type = other DNA
actaataatcagcggccctca

SEQ ID NO: 2480 - DNA, 21 bp, synthetic construct
  source 1..21: mol_type = other DNA
actaataatcagcggccctca

SEQ ID NO: 2481 - DNA, 21 bp, synthetic construct
  source 1..21: mol_type = other DNA
actaataatcagcggccctca

SEQ ID NO: 2482 - DNA, 21 bp, synthetic construct
  source 1..21: mol_type = other DNA
actaataatcagcggccctca

SEQ ID NO: 2483 - DNA, 21 bp, synthetic construct
  source 1..21: mol_type = other DNA
actaataatcagcggccctca

SEQ ID NO: 2484 - DNA, 21 bp, synthetic construct
  source 1..21: mol_type = other DNA
actaataatcagcggccctca

SEQ ID NO: 2485 - DNA, 21 bp, synthetic construct
  source 1..21: mol_type = other DNA
actaataatcagcggccctca

SEQ ID NO: 2486 - DNA, 21 bp, synthetic construct
  source 1..21: mol_type = other DNA
actaataatcagcggccctca

SEQ ID NO: 2487 - DNA, 21 bp, synthetic construct
  source 1..21: mol_type = other DNA
actaataatcagcggccctca

SEQ ID NO: 2488 - DNA, 21 bp, synthetic construct
  source 1..21: mol_type = other DNA
actaataatcagcggccctca

SEQ ID NO: 2489 - DNA, 21 bp, synthetic construct
  source 1..21: mol_type = other DNA
actaataatcagcggccctca

SEQ ID NO: 2490 - DNA, 21 bp, synthetic construct
  source 1..21: mol_type = other DNA
actaataatcagcggccctca

SEQ ID NO: 2491 - DNA, 21 bp, synthetic construct
  source 1..21: mol_type = other DNA
actaataatcagcggccctca

SEQ ID NO: 2492 - DNA, 21 bp, synthetic construct
  source 1..21: mol_type = other DNA
actaataatcagcggccctca

SEQ ID NO: 2493 - DNA, 21 bp, synthetic construct
  source 1..21: mol_type = other DNA
ggtgcatccagtttgcaaagt

SEQ ID NO: 2494 - DNA, 21 bp, synthetic construct
  source 1..21: mol_type = other DNA
ggtgcatccagtttgcaaagt

SEQ ID NO: 2495 - DNA, 21 bp, synthetic construct
  source 1..21: mol_type = other DNA
actaataatcagcggccctca

SEQ ID NO: 2496 - DNA, 21 bp, synthetic construct
  source 1..21: mol_type = other DNA
gttgcatccagtttgcaaagt

SEQ ID NO: 2497 - DNA, 21 bp, synthetic construct
  source 1..21: mol_type = other DNA
gacaataataagcgaccctca

SEQ ID NO: 2498 - DNA, 21 bp, synthetic construct
  source 1..21: mol_type = other DNA
gttgcatccagtttgcaaagt

SEQ ID NO: 2499 - DNA, 21 bp, synthetic construct
  source 1..21: mol_type = other DNA
gttgcatccagtttgcaaagt

SEQ ID NO: 2500 - DNA, 21 bp, synthetic construct
  source 1..21: mol_type = other DNA
gttgcatccagtttgcaaagt

SEQ ID NO: 2501 - DNA, 21 bp, synthetic construct
  source 1..21: mol_type = other DNA
gttgcatccagtttgcaaagt

SEQ ID NO: 2502 - DNA, 21 bp, synthetic construct
  source 1..21: mol_type = other DNA
gttgcatccagtttgcaaagt

SEQ ID NO: 2503 - DNA, 21 bp, synthetic construct
  source 1..21: mol_type = other DNA
gttgcatccagtttgcaaagt

SEQ ID NO: 2504 - DNA, 21 bp, synthetic construct
  source 1..21: mol_type = other DNA
gacaataataagcgaccctca

SEQ ID NO: 2505 - DNA, 21 bp, synthetic construct
  source 1..21: mol_type = other DNA
gacaataataagcgaccctca

SEQ ID NO: 2506 - DNA, 21 bp, synthetic construct
  source 1..21: mol_type = other DNA
gacaataataagcgaccctca

SEQ ID NO: 2507 - DNA, 21 bp, synthetic construct
  source 1..21: mol_type = other DNA
gacaataataagcgaccctca

SEQ ID NO: 2508 - DNA, 21 bp, synthetic construct
  source 1..21: mol_type = other DNA
gacaataataagcgaccctca

SEQ ID NO: 2509 - DNA, 21 bp, synthetic construct
  source 1..21: mol_type = other DNA
gacaataataagcgaccctca

SEQ ID NO: 2510 - DNA, 21 bp, synthetic construct
  source 1..21: mol_type = other DNA
gacaataataagcgaccctca

SEQ ID NO: 2511 - DNA, 21 bp, synthetic construct
  source 1..21: mol_type = other DNA
gacaataataagcgaccctca

SEQ ID NO: 2512 - DNA, 21 bp, synthetic construct
  source 1..21: mol_type = other DNA
gttgcatccagtttgcaaagt

SEQ ID NO: 2513 - DNA, 33 bp, synthetic construct
  source 1..33: mol_type = other DNA
gcaacattcgatgacagcctgaatggtccggta

SEQ ID NO: 2514 - DNA, 27 bp, synthetic construct
  source 1..27: mol_type = other DNA
ctacagcataataattaccccttcact

SEQ ID NO: 2515 - DNA, 27 bp, synthetic construct
  source 1..27: mol_type = other DNA
ctacagcataataattaccccttcact

SEQ ID NO: 2516 - DNA, 24 bp, synthetic construct
  source 1..24: mol_type = other DNA
caacagtatgatattctcctcact

SEQ ID NO: 2517 - DNA, 27 bp, synthetic construct
  source 1..27: mol_type = other DNA
caacaatattatagtactccgtggacg

SEQ ID NO: 2518 - DNA, 27 bp, synthetic construct
  source 1..27: mol_type = other DNA
caacaatattatagtactccgtggacg

SEQ ID NO: 2519 - DNA, 27 bp, synthetic construct
  source 1..27: mol_type = other DNA
cagcaatattatcgtactccgtggacg

SEQ ID NO: 2520 - DNA, 27 bp, synthetic construct
  source 1..27: mol_type = other DNA
cagcaatattatcgtactccgtggacg

SEQ ID NO: 2521 - DNA, 27 bp, synthetic construct
  source 1..27: mol_type = other DNA
cagcagtatggtagttcaccgctcact

SEQ ID NO: 2522 - DNA, 27 bp, synthetic construct
  source 1..27: mol_type = other DNA
cagcagtataataactggcctctcact

SEQ ID NO: 2523 - DNA, 27 bp, synthetic construct
  source 1..27: mol_type = other DNA
ctacagcataatagttacccattcact

SEQ ID NO: 2524 - DNA, 24 bp, synthetic construct
  source 1..24: mol_type = other DNA
caacagtatgatgatctattcact

SEQ ID NO: 2525 - DNA, 27 bp, synthetic construct
  source 1..27: mol_type = other DNA
caacagactaacagtttccctccgacg

SEQ ID NO: 2526 - DNA, 27 bp, synthetic construct
  source 1..27: mol_type = other DNA
caacagactaacagtttccctccgacg

SEQ ID NO: 2527 - DNA, 27 bp, synthetic construct
  source 1..27: mol_type = other DNA
ctacagcataatagttacccattcact

SEQ ID NO: 2528 - DNA, 27 bp, synthetic construct
  source 1..27: mol_type = other DNA
ctacagcataatagttacccattcact

SEQ ID NO: 2529 - DNA, 27 bp, synthetic construct
  source 1..27: mol_type = other DNA
ctacagcataatagttacccattcact

SEQ ID NO: 2530 - DNA, 27 bp, synthetic construct
  source 1..27: mol_type = other DNA
ctacagcataatagttacccattcact

SEQ ID NO: 2531 - DNA, 27 bp, synthetic construct
  source 1..27: mol_type = other DNA
ctacagcataatagttacccattcact

SEQ ID NO: 2532 - DNA, 27 bp, synthetic construct
  source 1..27: mol_type = other DNA
ctacagcataatagttacccattcact

SEQ ID NO: 2533 - DNA, 27 bp, synthetic construct
  source 1..27: mol_type = other DNA
ctacagcataataattaccccttcact

SEQ ID NO: 2534 - DNA, 27 bp, synthetic construct
  source 1..27: mol_type = other DNA
ctacagcataataattaccccttcact

SEQ ID NO: 2535 - DNA, 27 bp, synthetic construct
  source 1..27: mol_type = other DNA
ctacagcataataattaccccttcact

SEQ ID NO: 2536 - DNA, 27 bp, synthetic construct
  source 1..27: mol_type = other DNA
ctacagcataataattaccccttcact

SEQ ID NO: 2537 - DNA, 27 bp, synthetic construct
  source 1..27: mol_type = other DNA
ctacagcataataattaccccttcact

SEQ ID NO: 2538 - DNA, 27 bp, synthetic construct
  source 1..27: mol_type = other DNA
ctacagcataataattaccccttcact

SEQ ID NO: 2539 - DNA, 27 bp, synthetic construct
  source 1..27: mol_type = other DNA
ctacagcataataattaccccttcact

SEQ ID NO: 2540 - DNA, 27 bp, synthetic construct
  source 1..27: mol_type = other DNA
ctacagcataataattaccccttcact

SEQ ID NO: 2541 - DNA, 27 bp, synthetic construct
  source 1..27: mol_type = other DNA
ctacagcataataattaccccttcact

SEQ ID NO: 2542 - DNA, 27 bp, synthetic construct
  source 1..27: mol_type = other DNA
ctacagcataataattaccccttcact

SEQ ID NO: 2543 - DNA, 27 bp, synthetic construct
  source 1..27: mol_type = other DNA
ctacagcataataattaccccttcact

SEQ ID NO: 2544 - DNA, 27 bp, synthetic construct
  source 1..27: mol_type = other DNA
ctacagcataataattaccccttcact

SEQ ID NO: 2545 - DNA, 27 bp, synthetic construct
  source 1..27: mol_type = other DNA
ctacagcataataattaccccttcact

SEQ ID NO: 2546 - DNA, 27 bp, synthetic construct
  source 1..27: mol_type = other DNA
ctacagcataataattaccccttcact

SEQ ID NO: 2547 - DNA, 27 bp, synthetic construct
  source 1..27: mol_type = other DNA
ctacagcataataattaccccttcact

SEQ ID NO: 2548 - DNA, 27 bp, synthetic construct
  source 1..27: mol_type = other DNA
ctacagcataataattaccccttcact

SEQ ID NO: 2549 - DNA, 27 bp, synthetic construct
  source 1..27: mol_type = other DNA
ctacagcataataattaccccttcact

SEQ ID NO: 2550 - DNA, 27 bp, synthetic construct
  source 1..27: mol_type = other DNA
ctacagcataataattaccccttcact

SEQ ID NO: 2551 - DNA, 27 bp, synthetic construct
  source 1..27: mol_type = other DNA
ctacagcataataattaccccttcact

SEQ ID NO: 2552 - DNA, 24 bp, synthetic construct
  source 1..24: mol_type = other DNA
caacagtatgatattctcctcact

SEQ ID NO: 2553 - DNA, 24 bp, synthetic construct
  source 1..24: mol_type = other DNA
caacagtatgatattctcctcact

SEQ ID NO: 2554 - DNA, 24 bp, synthetic construct
  source 1..24: mol_type = other DNA
caacagtatgatattctcctcact

SEQ ID NO: 2555 - DNA, 24 bp, synthetic construct
  source 1..24: mol_type = other DNA
caacagtatgatattctcctcact

SEQ ID NO: 2556 - DNA, 24 bp, synthetic construct
  source 1..24: mol_type = other DNA
caacagtatgatattctcctcact

SEQ ID NO: 2557 - DNA, 24 bp, synthetic construct
  source 1..24: mol_type = other DNA
caacagtatgatattctcctcact

SEQ ID NO: 2558 - DNA, 24 bp, synthetic construct
  source 1..24: mol_type = other DNA
caacagtatgatattctcctcact

SEQ ID NO: 2559 - DNA, 24 bp, synthetic construct
  source 1..24: mol_type = other DNA
caacagtatgatattctcctcact

SEQ ID NO: 2560 - DNA, 24 bp, synthetic construct
  source 1..24: mol_type = other DNA
caacagtatgatattctcctcact

SEQ ID NO: 2561 - DNA, 27 bp, synthetic construct
  source 1..27: mol_type = other DNA
ctacagcataataattaccccttcact

SEQ ID NO: 2562 - DNA, 27 bp, synthetic construct
  source 1..27: mol_type = other DNA
ctacagcataataattaccccttcact

SEQ ID NO: 2563 - DNA, 27 bp, synthetic construct
  source 1..27: mol_type = other DNA
ctacagcataataattaccccttcact

SEQ ID NO: 2564 - DNA, 27 bp, synthetic construct
  source 1..27: mol_type = other DNA
ctacagcataataattaccccttcact

SEQ ID NO: 2565 - DNA, 27 bp, synthetic construct
  source 1..27: mol_type = other DNA
ctacagcataataattaccccttcact

SEQ ID NO: 2566 - DNA, 27 bp, synthetic construct
  source 1..27: mol_type = other DNA
ctacagcataataattaccccttcact

SEQ ID NO: 2567 - DNA, 27 bp, synthetic construct
  source 1..27: mol_type = other DNA
ctacagcataataattaccccttcact

SEQ ID NO: 2568 - DNA, 24 bp, synthetic construct
  source 1..24: mol_type = other DNA
caacagtatgatgatctattcact

SEQ ID NO: 2569 - DNA, 24 bp, synthetic construct
  source 1..24: mol_type = other DNA
caacagtatgatgatctattcact

SEQ ID NO: 2570 - DNA, 24 bp, synthetic construct
  source 1..24: mol_type = other DNA
caacagtatgatgatctattcact

SEQ ID NO: 2571 - DNA, 24 bp, synthetic construct
  source 1..24: mol_type = other DNA
caacagtatgatgatctattcact

SEQ ID NO: 2572 - DNA, 24 bp, synthetic construct
  source 1..24: mol_type = other DNA
caacagtatgatgatctattcact

SEQ ID NO: 2573 - DNA, 24 bp, synthetic construct
  source 1..24: mol_type = other DNA
caacagtatgatgatctattcact

SEQ ID NO: 2574 - DNA, 24 bp, synthetic construct
  source 1..24: mol_type = other DNA
caacagtatgatgatctattcact

SEQ ID NO: 2575 - DNA, 24 bp, synthetic construct
  source 1..24: mol_type = other DNA
caacagtatgatgatctattcact

SEQ ID NO: 2576 - DNA, 24 bp, synthetic construct
  source 1..24: mol_type = other DNA
caacagtatgatgatctattcact

SEQ ID NO: 2577 - DNA, 24 bp, synthetic construct
  source 1..24: mol_type = other DNA
caacagtatgatgatctattcact

SEQ ID NO: 2578 - DNA, 24 bp, synthetic construct
  source 1..24: mol_type = other DNA
caacagtatgatgatctattcact

SEQ ID NO: 2579 - DNA, 24 bp, synthetic construct
  source 1..24: mol_type = other DNA
cagcagtatggtagctcacctcgc

SEQ ID NO: 2580 - DNA, 24 bp, synthetic construct
  source 1..24: mol_type = other DNA
cagcagtatggtagctcacctcgc

SEQ ID NO: 2581 - DNA, 24 bp, synthetic construct
  source 1..24: mol_type = other DNA
cagcagtatggtagctcacctcgc

SEQ ID NO: 2582 - DNA, 24 bp, synthetic construct
  source 1..24: mol_type = other DNA
cagcagtatggtagctcacctcgc

SEQ ID NO: 2583 - DNA, 27 bp, synthetic construct
  source 1..27: mol_type = other DNA
cagcagtataataactggcctctcact

SEQ ID NO: 2584 - DNA, 27 bp, synthetic construct
  source 1..27: mol_type = other DNA
cagcagtataataactggcctctcact

SEQ ID NO: 2585 - DNA, 27 bp, synthetic construct
  source 1..27: mol_type = other DNA
cagcagtataataactggcctctcact

SEQ ID NO: 2586 - DNA, 27 bp, synthetic construct
  source 1..27: mol_type = other DNA
cagcagtataataactggcctctcact

SEQ ID NO: 2587 - DNA, 27 bp, synthetic construct
  source 1..27: mol_type = other DNA
cagcagtataataacttccctctcact

SEQ ID NO: 2588 - DNA, 27 bp, synthetic construct
  source 1..27: mol_type = other DNA
cagcagtataataactatcctctcact

SEQ ID NO: 2589 - DNA, 27 bp, synthetic construct
  source 1..27: mol_type = other DNA
cagcagtataataactggcctctcact

SEQ ID NO: 2590 - DNA, 27 bp, synthetic construct
  source 1..27: mol_type = other DNA
cagcagtataataactggcctctcact

SEQ ID NO: 2591 - DNA, 27 bp, synthetic construct
  source 1..27: mol_type = other DNA
cagcagtatggtagttcaccgctcact

SEQ ID NO: 2592 - DNA, 27 bp, synthetic construct
  source 1..27: mol_type = other DNA
cagcagtatggtagttcaccgctcact

SEQ ID NO: 2593 - DNA, 27 bp, synthetic construct
  source 1..27: mol_type = other DNA
cagcagtatggtagttcaccgctcact

SEQ ID NO: 2594 - DNA, 27 bp, synthetic construct
  source 1..27: mol_type = other DNA
cagcagtatggtagttcaccgctcact

SEQ ID NO: 2595 - DNA, 27 bp, synthetic construct
  source 1..27: mol_type = other DNA
cagcagtatggtagttcaccgctcact

SEQ ID NO: 2596 - DNA, 27 bp, synthetic construct
  source 1..27: mol_type = other DNA
cagcagtatggtagttcaccgctcact

SEQ ID NO: 2597 - DNA, 27 bp, synthetic construct
  source 1..27: mol_type = other DNA
cagcagtatggtagttcaccgctcact

SEQ ID NO: 2598 - DNA, 27 bp, synthetic construct
  source 1..27: mol_type = other DNA
caacaatattatagtactccgtggacg

SEQ ID NO: 2599 - DNA, 27 bp, synthetic construct
  source 1..27: mol_type = other DNA
caacaatattatagtactccgtggacg

SEQ ID NO: 2600 - DNA, 27 bp, synthetic construct
  source 1..27: mol_type = other DNA
caacaatattatagtactccgtggacg

SEQ ID NO: 2601 - DNA, 27 bp, synthetic construct
  source 1..27: mol_type = other DNA
caacaatattatagtactccgtggacg

SEQ ID NO: 2602 - DNA, 27 bp, synthetic construct
  source 1..27: mol_type = other DNA
caacaatattatagtactccgtggacg

SEQ ID NO: 2603 - DNA, 27 bp, synthetic construct
  source 1..27: mol_type = other DNA
caacaatattatagtactccgtggacg

SEQ ID NO: 2604 - DNA, 27 bp, synthetic construct
  source 1..27: mol_type = other DNA
caacaatattatagtactccgtggacg

SEQ ID NO: 2605 - DNA, 27 bp, synthetic construct
  source 1..27: mol_type = other DNA
caacaatattatagtactccgtggacg

SEQ ID NO: 2606 - DNA, 27 bp, synthetic construct
  source 1..27: mol_type = other DNA
caacaatattatagtactccgtggacg

SEQ ID NO: 2607 - DNA, 27 bp, synthetic construct
  source 1..27: mol_type = other DNA
caacaatattatagtactccgtggacg

SEQ ID NO: 2608 - DNA, 27 bp, synthetic construct
  source 1..27: mol_type = other DNA
caacaatattatagtactccgtggacg

SEQ ID NO: 2609 - DNA, 27 bp, synthetic construct
  source 1..27: mol_type = other DNA
cagcaatattatcgtactccgtggacg

SEQ ID NO: 2610 - DNA, 27 bp, synthetic construct
  source 1..27: mol_type = other DNA
cagcaatattatcgtactccgtggacg

SEQ ID NO: 2611 - DNA, 27 bp, synthetic construct
  source 1..27: mol_type = other DNA
cagcaatattatcgtactccgtggacg

SEQ ID NO: 2612 - DNA, 27 bp, synthetic construct
  source 1..27: mol_type = other DNA
cagcaatattatcgtactccgtggacg

SEQ ID NO: 2613 - DNA, 27 bp, synthetic construct
  source 1..27: mol_type = other DNA
cagcaatattatcgtactccgtggacg

SEQ ID NO: 2614 - DNA, 27 bp, synthetic construct
  source 1..27: mol_type = other DNA
cagcaatattatcgtactccgtggacg

SEQ ID NO: 2615 - DNA, 27 bp, synthetic construct
  source 1..27: mol_type = other DNA
cagcaatattatcgtactccgtggacg

SEQ ID NO: 2616 - DNA, 27 bp, synthetic construct
  source 1..27: mol_type = other DNA
cagcaatattatcgtactccgtggacg

SEQ ID NO: 2617 - DNA, 27 bp, synthetic construct
  source 1..27: mol_type = other DNA
cagcaatattatcgtactccgtggacg

SEQ ID NO: 2618 - DNA, 27 bp, synthetic construct
  source 1..27: mol_type = other DNA
caacaatattatagtactccgtggacg

SEQ ID NO: 2619 - DNA, 27 bp, synthetic construct
  source 1..27: mol_type = other DNA
caacaatattatagtactccgtggacg

SEQ ID NO: 2620 - DNA, 27 bp, synthetic construct
  source 1..27: mol_type = other DNA
caacaatattatagtactccgtggacg

SEQ ID NO: 2621 - DNA, 27 bp, synthetic construct
  source 1..27: mol_type = other DNA
caacaatattatagtactccgtggacg

SEQ ID NO: 2622 - DNA, 27 bp, synthetic construct
  source 1..27: mol_type = other DNA
caacaatattatagtactccgtggacg

SEQ ID NO: 2623 - DNA, 27 bp, synthetic construct
  source 1..27: mol_type = other DNA
cagcaatattatcgtactccgtggacg

SEQ ID NO: 2624 - DNA, 27 bp, synthetic construct
  source 1..27: mol_type = other DNA
cagcaatattatcgtactccgtggacg

SEQ ID NO: 2625 - DNA, 27 bp, synthetic construct
  source 1..27: mol_type = other DNA
cagcaatattatcgtactccgtggacg

SEQ ID NO: 2626 - DNA, 27 bp, synthetic construct
  source 1..27: mol_type = other DNA
cagcaatattatcgtactccgtggacg

SEQ ID NO: 2627 - DNA, 27 bp, synthetic construct
  source 1..27: mol_type = other DNA
cagcaatattatcgtactccgtggacg

SEQ ID NO: 2628 - DNA, 27 bp, synthetic construct
  source 1..27: mol_type = other DNA
cagcaatattatcgtactccgtggacg

SEQ ID NO: 2629 - DNA, 27 bp, synthetic construct
  source 1..27: mol_type = other DNA
cagcaatattatcgtactccgtggacg

SEQ ID NO: 2630 - DNA, 27 bp, synthetic construct
  source 1..27: mol_type = other DNA
cagcaatattatcgtactccgtggacg

SEQ ID NO: 2631 - DNA, 27 bp, synthetic construct
  source 1..27: mol_type = other DNA
cagcaatattatcgtactccgtggacg

SEQ ID NO: 2632 - DNA, 27 bp, synthetic construct
  source 1..27: mol_type = other DNA
cagcaatattatcgtactccgtggacg

SEQ ID NO: 2633 - DNA, 27 bp, synthetic construct
  source 1..27: mol_type = other DNA
cagcaatattatcgtactccgtggacg

SEQ ID NO: 2634 - DNA, 27 bp, synthetic construct
  source 1..27: mol_type = other DNA
cagcaatattatcgtactccgtggacg

SEQ ID NO: 2635 - DNA, 27 bp, synthetic construct
  source 1..27: mol_type = other DNA
cagcaatattatcgtactccgtggacg

SEQ ID NO: 2636 - DNA, 33 bp, synthetic construct
  source 1..33: mol_type = other DNA
gcaacattcgatgaaagcctgagtggtccggta

SEQ ID NO: 2637 - DNA, 33 bp, synthetic construct
  source 1..33: mol_type = other DNA
gcaacattcgatgaaagcctgcaaggtccggta

SEQ ID NO: 2638 - DNA, 33 bp, synthetic construct; identical to SEQ ID NO: 2636
  source 1..33: mol_type = other DNA

SEQ ID NO: 2639 - DNA, 33 bp, synthetic construct; identical to SEQ ID NO: 2637
  source 1..33: mol_type = other DNA

SEQ ID NO: 2640 - DNA, 33 bp, synthetic construct; identical to SEQ ID NO: 2513
  source 1..33: mol_type = other DNA

SEQ ID NO: 2641 - DNA, 33 bp, synthetic construct; identical to SEQ ID NO: 2513
  source 1..33: mol_type = other DNA

SEQ ID NO: 2642 - DNA, 33 bp, synthetic construct
  source 1..33: mol_type = other DNA
gcaacattcgatgaaagcctgaatggtccggta

SEQ ID NO: 2643 - DNA, 33 bp, synthetic construct
  source 1..33: mol_type = other DNA
gcaacattcgatgacagcctgcaaggtccggta

SEQ ID NO: 2644 - DNA, 33 bp, synthetic construct
  source 1..33: mol_type = other DNA
gcaacattcgatgacagcctgagtggtccggta

SEQ ID NO: 2645 - DNA, 33 bp, synthetic construct
  source 1..33: mol_type = other DNA
gcaacattcgatgacagcctgaatgctccggta

SEQ ID NO: 2646 - DNA, 33 bp, synthetic construct
  source 1..33: mol_type = other DNA
gcaacattcgatagcagcctgaatggtccggta

SEQ ID NO: 2647 - DNA, 33 bp, synthetic construct
  source 1..33: mol_type = other DNA
gcaacattcgatagcagcctgaatgctccggta

SEQ ID NO: 2648 - DNA, 33 bp, synthetic construct; identical to SEQ ID NO: 2647
  source 1..33: mol_type = other DNA

SEQ ID NO: 2649 - DNA, 33 bp, synthetic construct; identical to SEQ ID NO: 2636
  source 1..33: mol_type = other DNA

SEQ ID NO: 2650 - DNA, 27 bp, synthetic construct
  source 1..27: mol_type = other DNA
ctacagcataataattaccccttcact

SEQ ID NO: 2651 - DNA, 27 bp, synthetic construct
  source 1..27: mol_type = other DNA
ctacagcataataattaccccttcact

SEQ ID NO: 2652 - DNA, 33 bp, synthetic construct
  source 1..33: mol_type = other DNA
gcaacattcgatagcagcctgagtggtccggta

SEQ ID NO: 2653 - DNA, 27 bp, synthetic construct
  source 1..27: mol_type = other DNA
caacagagttacagtaccctgatcagt

SEQ ID NO: 2654 - DNA, 33 bp, synthetic construct
  source 1..33: mol_type = other DNA
ggaacatgggatagcagcctgagtgctgtggta

SEQ ID NO: 2655 - DNA, 27 bp, synthetic construct
  source 1..27: mol_type = other DNA
caacagagttacagtaccctgatcagt

SEQ ID NO: 2656 - DNA, 27 bp, synthetic construct
  source 1..27: mol_type = other DNA
caacagagttacagtaccctgatcagt

SEQ ID NO: 2657 - DNA, 27 bp, synthetic construct
  source 1..27: mol_type = other DNA
caacagagttacagtaccctgatcagt

SEQ ID NO: 2658 - DNA, 27 bp, synthetic construct
  source 1..27: mol_type = other DNA
caacagagttacagtaccctgatcagt

SEQ ID NO: 2659 - DNA, 27 bp, synthetic construct
  source 1..27: mol_type = other DNA
caacagagttacagtaccctgatcagt

SEQ ID NO: 2660 - DNA, 27 bp, synthetic construct
  source 1..27: mol_type = other DNA
caacagagttacagtaccctgatcagt

SEQ ID NO: 2661 - DNA, 33 bp, synthetic construct; identical to SEQ ID NO: 2654
  source 1..33: mol_type = other DNA

SEQ ID NO: 2662 - DNA, 33 bp, synthetic construct; identical to SEQ ID NO: 2654
  source 1..33: mol_type = other DNA

SEQ ID NO: 2663 - DNA, 33 bp, synthetic construct; identical to SEQ ID NO: 2654
  source 1..33: mol_type = other DNA

SEQ ID NO: 2664 - DNA, 33 bp, synthetic construct
  source 1..33: mol_type = other DNA
ggaacattcgaaagcagcctgagtgctgtggta

SEQ ID NO: 2665 - DNA, 33 bp, synthetic construct; identical to SEQ ID NO: 2654
  source 1..33: mol_type = other DNA

SEQ ID NO: 2666 - DNA, 33 bp, synthetic construct; identical to SEQ ID NO: 2654
  source 1..33: mol_type = other DNA

SEQ ID NO: 2667 - DNA, 33 bp, synthetic construct; identical to SEQ ID NO: 2654
  source 1..33: mol_type = other DNA

SEQ ID NO: 2668 - DNA, 33 bp, synthetic construct; identical to SEQ ID NO: 2664
  source 1..33: mol_type = other DNA

SEQ ID NO: 2669 - DNA, 27 bp, synthetic construct
  source 1..27: mol_type = other DNA
caacagagttacagtaccctgctcagt

SEQ ID NO: 2670 - DNA, 15 bp, synthetic construct
  source 1..15: mol_type = other DNA
ggctactatatgcat

SEQ ID NO: 2671 - DNA, 15 bp, synthetic construct
  source 1..15: mol_type = other DNA
aactttggcatgcac

SEQ ID NO: 2672 - DNA, 15 bp, synthetic construct
  source 1..15: mol_type = other DNA
tactttggcatgcac

SEQ ID NO: 2673 - DNA, 15 bp, synthetic construct
  source 1..15: mol_type = other DNA
agctatggcatgcac

SEQ ID NO: 2674 - DNA, 15 bp, synthetic construct
  source 1..15: mol_type = other DNA
ggctactatatccac

SEQ ID NO: 2675 - DNA, 15 bp, synthetic construct
  source 1..15: mol_type = other DNA
ggctactatatccac

SEQ ID NO: 2676 - DNA, 15 bp, synthetic construct
  source 1..15: mol_type = other DNA
ggctactatatacac

SEQ ID NO: 2677 - DNA, 15 bp, synthetic construct
  source 1..15: mol_type = other DNA
ggctactatatacac

SEQ ID NO: 2678 - DNA, 21 bp, synthetic construct
  source 1..21: mol_type = other DNA
agtggtggttactactggagc

SEQ ID NO: 2679 - DNA, 15 bp, synthetic construct
  source 1..15: mol_type = other DNA
aactatggcatgcac

SEQ ID NO: 2680 - DNA, 15 bp, synthetic construct
  source 1..15: mol_type = other DNA
tactttggcatgcac

SEQ ID NO: 2681 - DNA, 15 bp, synthetic construct
  source 1..15: mol_type = other DNA
agctatggcatgcac

SEQ ID NO: 2682 - DNA, 15 bp, synthetic construct
  source 1..15: mol_type = other DNA
agttactactggagc

SEQ ID NO: 2683 - DNA, 15 bp, synthetic construct
  source 1..15: mol_type = other DNA
agttactactggagc

SEQ ID NO: 2684 - DNA, 15 bp, synthetic construct
  source 1..15: mol_type = other DNA
tactttggcatgcac

SEQ ID NO: 2685 - DNA, 15 bp, synthetic construct
  source 1..15: mol_type = other DNA
tactttggcatgcac

SEQ ID NO: 2686 - DNA, 15 bp, synthetic construct
  source 1..15: mol_type = other DNA
tactttggcatgcac

SEQ ID NO: 2687 - DNA, 15 bp, synthetic construct
  source 1..15: mol_type = other DNA
tactttggcatgcac

SEQ ID NO: 2688 - DNA, 15 bp, synthetic construct
  source 1..15: mol_type = other DNA
tactttggcatgcac

SEQ ID NO: 2689 - DNA, 15 bp, synthetic construct
  source 1..15: mol_type = other DNA
tactttggcatgcac

SEQ ID NO: 2690 - DNA, 15 bp, synthetic construct
  source 1..15: mol_type = other DNA
aactttggcatgcac

SEQ ID NO: 2691 - DNA, 15 bp, synthetic construct
  source 1..15: mol_type = other DNA
aactttggcatgcac

SEQ ID NO: 2692 - DNA, 15 bp, synthetic construct
  source 1..15: mol_type = other DNA
aactttggcatgcac

SEQ ID NO: 2693 - DNA, 15 bp, synthetic construct
  source 1..15: mol_type = other DNA
aactttggcatgcac

SEQ ID NO: 2694 - DNA, 15 bp, synthetic construct
  source 1..15: mol_type = other DNA
aactttggcatgcac

SEQ ID NO: 2695 - DNA, 15 bp, synthetic construct
  source 1..15: mol_type = other DNA
aactttggcatgcac

SEQ ID NO: 2696 - DNA, 15 bp, synthetic construct
  source 1..15: mol_type = other DNA
aactttggcatgcac

SEQ ID NO: 2697 - DNA, 15 bp, synthetic construct
  source 1..15: mol_type = other DNA
aactttggcatgcac

SEQ ID NO: 2698 - DNA, 15 bp, synthetic construct
  source 1..15: mol_type = other DNA
aactttggcatgcac

SEQ ID NO: 2699 - DNA, 15 bp, synthetic construct
  source 1..15: mol_type = other DNA
aactttggcatgcac

SEQ ID NO: 2700 - DNA, 15 bp, synthetic construct
  source 1..15: mol_type = other DNA
aactttggcatgcac

SEQ ID NO: 2701 - DNA, 15 bp, synthetic construct
  source 1..15: mol_type = other DNA
aactttggcatgcac

SEQ ID NO: 2702 - DNA, 15 bp, synthetic construct
  source 1..15: mol_type = other DNA
aactttggcatgcac

SEQ ID NO: 2703 - DNA, 15 bp, synthetic construct
  source 1..15: mol_type = other DNA
aactttggcatgcac

SEQ ID NO: 2704 - DNA, 15 bp, synthetic construct
  source 1..15: mol_type = other DNA
aactttggcatgcac

SEQ ID NO: 2705 - DNA, 15 bp, synthetic construct
  source 1..15: mol_type = other DNA
aactttggcatgcac

SEQ ID NO: 2706 - DNA, 15 bp, synthetic construct
  source 1..15: mol_type = other DNA
aactttggcatgcac

SEQ ID NO: 2707 - DNA, 15 bp, synthetic construct
  source 1..15: mol_type = other DNA
aactttggcatgcac

SEQ ID NO: 2708 - DNA, 15 bp, synthetic construct
  source 1..15: mol_type = other DNA
aactttggcatgcac

SEQ ID NO: 2709 - DNA, 15 bp, synthetic construct
  source 1..15: mol_type = other DNA
agctatggcatgcac

SEQ ID NO: 2710 - DNA, 15 bp, synthetic construct
  source 1..15: mol_type = other DNA
agctatggcatgcac

SEQ ID NO: 2711 - DNA, 15 bp, synthetic construct
  source 1..15: mol_type = other DNA
agctatggcatgcac

SEQ ID NO: 2712 - DNA, 15 bp, synthetic construct
  source 1..15: mol_type = other DNA
agctatggcatgcac

SEQ ID NO: 2713 - DNA, 15 bp, synthetic construct
  source 1..15: mol_type = other DNA
agctatggcatgcac

SEQ ID NO: 2714 - DNA, 15 bp, synthetic construct
  source 1..15: mol_type = other DNA
agctatggcatgcac

SEQ ID NO: 2715 - DNA, 15 bp, synthetic construct
  source 1..15: mol_type = other DNA
agctatggcatgcac

SEQ ID NO: 2716 - DNA, 15 bp, synthetic construct
  source 1..15: mol_type = other DNA
agctatggcatgcac

SEQ ID NO: 2717 - DNA, 15 bp, synthetic construct
  source 1..15: mol_type = other DNA
agctatggcatgcac

SEQ ID NO: 2718 - DNA, 15 bp, synthetic construct
  source 1..15: mol_type = other DNA
tactttggcatgcac

SEQ ID NO: 2719 - DNA, 15 bp, synthetic construct
  source 1..15: mol_type = other DNA
tactttggcatgcac

SEQ ID NO: 2720 - DNA, 15 bp, synthetic construct
  source 1..15: mol_type = other DNA
tactttggcatgcac

SEQ ID NO: 2721 - DNA, 15 bp, synthetic construct
  source 1..15: mol_type = other DNA
tactttggcatgcac

SEQ ID NO: 2722 - DNA, 15 bp, synthetic construct
  source 1..15: mol_type = other DNA
tactttggcatgcac

SEQ ID NO: 2723 - DNA, 15 bp, synthetic construct
  source 1..15: mol_type = other DNA
tactttggcatgcac

SEQ ID NO: 2724 - DNA, 15 bp, synthetic construct
  source 1..15: mol_type = other DNA
tactttggcatgcac

SEQ ID NO: 2725 - DNA, 15 bp, synthetic construct
  source 1..15: mol_type = other DNA
agctatggcatgcac

SEQ ID NO: 2726 - DNA, 15 bp, synthetic construct
  source 1..15: mol_type = other DNA
agctatggcatgcac

SEQ ID NO: 2727 - DNA, 15 bp, synthetic construct
  source 1..15: mol_type = other DNA
agctatggcatgcac

SEQ ID NO: 2728 - DNA, 15 bp, synthetic construct
  source 1..15: mol_type = other DNA
agctatggcatgcac

SEQ ID NO: 2729 - DNA, 15 bp, synthetic construct
  source 1..15: mol_type = other DNA
agctatggcatgcac

SEQ ID NO: 2730 - DNA, 15 bp, synthetic construct
  source 1..15: mol_type = other DNA
agctatggcatgcac

SEQ ID NO: 2731 - DNA, 15 bp, synthetic construct
  source 1..15: mol_type = other DNA
agctatggcatgcac

SEQ ID NO: 2732 - DNA, 15 bp, synthetic construct
  source 1..15: mol_type = other DNA
agctatggcatgcac

SEQ ID NO: 2733 - DNA, 15 bp, synthetic construct
  source 1..15: mol_type = other DNA
agctatggcatgcac

SEQ ID NO: 2734 - DNA, 15 bp, synthetic construct
  source 1..15: mol_type = other DNA
agctatggcatgcac

SEQ ID NO: 2735 - DNA, 15 bp, synthetic construct
  source 1..15: mol_type = other DNA
agctatggcatgcac

SEQ ID NO: 2736 - DNA, 15 bp, synthetic construct
  source 1..15: mol_type = other DNA
agctatggcatgcac

SEQ ID NO: 2737 - DNA, 15 bp, synthetic construct
  source 1..15: mol_type = other DNA
agctatggcatgcac

SEQ ID NO: 2738 - DNA, 15 bp, synthetic construct
  source 1..15: mol_type = other DNA
agctatggcatgcac

SEQ ID NO: 2739 - DNA, 15 bp, synthetic construct
  source 1..15: mol_type = other DNA
agctatggcatgcac

SEQ ID NO: 2740 - DNA, 15 bp, synthetic construct
  source 1..15: mol_type = other DNA
aactatggcatgcac

SEQ ID NO: 2741 - DNA, 15 bp, synthetic construct
  source 1..15: mol_type = other DNA
aactatggcatgcac

SEQ ID NO: 2742 - DNA, 15 bp, synthetic construct
  source 1..15: mol_type = other DNA
aactatggcatgcac

SEQ ID NO: 2743 - DNA, 15 bp, synthetic construct
  source 1..15: mol_type = other DNA
aactatggcatgcac

SEQ ID NO: 2744 - DNA, 15 bp, synthetic construct
  source 1..15: mol_type = other DNA
aactatggcatgcac

SEQ ID NO: 2745 - DNA, 15 bp, synthetic construct
  source 1..15: mol_type = other DNA
aactatggcatgcac

SEQ ID NO: 2746 - DNA, 15 bp, synthetic construct
  source 1..15: mol_type = other DNA
aactatggcatgcac

SEQ ID NO: 2747 - DNA, 15 bp, synthetic construct
  source 1..15: mol_type = other DNA
aactatggcatgcac

SEQ ID NO: 2748 - DNA, 21 bp, synthetic construct
  source 1..21: mol_type = other DNA
agtggtggttactactggagc

SEQ ID NO: 2749 - DNA, 21 bp, synthetic construct
  source 1..21: mol_type = other DNA
agtggtggttactactggagc

SEQ ID NO: 2750 - DNA, 21 bp, synthetic construct
  source 1..21: mol_type = other DNA
agtggtggttactactggagc

SEQ ID NO: 2751 - DNA, 21 bp, synthetic construct
  source 1..21: mol_type = other DNA
agtggtggttactactggagc

SEQ ID NO: 2752 - DNA, 21 bp, synthetic construct
  source 1..21: mol_type = other DNA
agtggtggttactactggagc

SEQ ID NO: 2753 - DNA, 21 bp, synthetic construct
  source 1..21: mol_type = other DNA
agtggtggttactactggagc

SEQ ID NO: 2754 - DNA, 21 bp, synthetic construct
  source 1..21: mol_type = other DNA
agtggtggttactactggagc

SEQ ID NO: 2755 - DNA, 15 bp, synthetic construct
  source 1..15: mol_type = other DNA
ggctactatatccac

SEQ ID NO: 2756 - DNA, 15 bp, synthetic construct
  source 1..15: mol_type = other DNA
ggctactatatccac

SEQ ID NO: 2757 - DNA, 15 bp, synthetic construct
  source 1..15: mol_type = other DNA
ggctactatatccac

SEQ ID NO: 2758 - DNA, 15 bp, synthetic construct
  source 1..15: mol_type = other DNA
ggctactatatccac

SEQ ID NO: 2759 - DNA, 15 bp, synthetic construct
  source 1..15: mol_type = other DNA
ggctactatatccac

SEQ ID NO: 2760 - DNA, 15 bp, synthetic construct
  source 1..15: mol_type = other DNA
ggctactatatccac

SEQ ID NO: 2761 - DNA, 15 bp, synthetic construct
  source 1..15: mol_type = other DNA
ggctactatatccac

SEQ ID NO: 2762 - DNA, 15 bp, synthetic construct
  source 1..15: mol_type = other DNA
ggctactatatccac

SEQ ID NO: 2763 - DNA, 15 bp, synthetic construct
  source 1..15: mol_type = other DNA
ggctactatatccac

SEQ ID NO: 2764 - DNA, 15 bp, synthetic construct
  source 1..15: mol_type = other DNA
ggctactatatccac

SEQ ID NO: 2765 - DNA, 15 bp, synthetic construct
  source 1..15: mol_type = other DNA
ggctactatatccac

SEQ ID NO: 2766 - DNA, 15 bp, synthetic construct
  source 1..15: mol_type = other DNA
ggctactatatacac

SEQ ID NO: 2767 - DNA, 15 bp, synthetic construct
  source 1..15: mol_type = other DNA
ggctactatatacac

SEQ ID NO: 2768 - DNA, 15 bp, synthetic construct
  source 1..15: mol_type = other DNA
ggctactatatacac

SEQ ID NO: 2769 - DNA, 15 bp, synthetic construct
  source 1..15: mol_type = other DNA
ggctactatatacac

SEQ ID NO: 2770 - DNA, 15 bp, synthetic construct
  source 1..15: mol_type = other DNA
ggctactatatacac

SEQ ID NO: 2771 - DNA, 15 bp, synthetic construct
  source 1..15: mol_type = other DNA
ggctactatatacac

SEQ ID NO: 2772 - DNA, 15 bp, synthetic construct
  source 1..15: mol_type = other DNA
ggctactatatacac

SEQ ID NO: 2773 - DNA, 15 bp, synthetic construct
  source 1..15: mol_type = other DNA
ggctactatatacac

SEQ ID NO: 2774 - DNA, 15 bp, synthetic construct
  source 1..15: mol_type = other DNA
ggctactatatacac

SEQ ID NO: 2775 - DNA, 15 bp, synthetic construct
  source 1..15: mol_type = other DNA
ggctactatatccac

SEQ ID NO: 2776 - DNA, 15 bp, synthetic construct
  source 1..15: mol_type = other DNA
ggctactatatccac

SEQ ID NO: 2777 - DNA, 15 bp, synthetic construct
  source 1..15: mol_type = other DNA
ggctactatatccac

SEQ ID NO: 2778 - DNA, 15 bp, synthetic construct
  source 1..15: mol_type = other DNA
ggctactatatccac

SEQ ID NO: 2779 - DNA, 15 bp, synthetic construct
  source 1..15: mol_type = other DNA
ggctactatatccac

SEQ ID NO: 2780 - DNA, 15 bp, synthetic construct
  source 1..15: mol_type = other DNA
ggctactatatacac

SEQ ID NO: 2781 - DNA, 15 bp, synthetic construct
  source 1..15: mol_type = other DNA
ggctactatatacac

SEQ ID NO: 2782 - DNA, 15 bp, synthetic construct
  source 1..15: mol_type = other DNA
ggctactatatacac

SEQ ID NO: 2783 - DNA, 15 bp, synthetic construct
  source 1..15: mol_type = other DNA
ggctactatatacac

SEQ ID NO: 2784 - DNA, 15 bp, synthetic construct
  source 1..15: mol_type = other DNA
ggctactatatacac

SEQ ID NO: 2785 - DNA, 15 bp, synthetic construct
  source 1..15: mol_type = other DNA
ggctactatatacac

SEQ ID NO: 2786 - DNA, 15 bp, synthetic construct
  source 1..15: mol_type = other DNA
ggctactatatacac

SEQ ID NO: 2787 - DNA, 15 bp, synthetic construct
  source 1..15: mol_type = other DNA
ggctactatatacac

SEQ ID NO: 2788 - DNA, 15 bp, synthetic construct
  source 1..15: mol_type = other DNA
ggctactatatacac

SEQ ID NO: 2789 - DNA, 15 bp, synthetic construct
  source 1..15: mol_type = other DNA
ggctactatatacac

SEQ ID NO: 2790 - DNA, 15 bp, synthetic construct
  source 1..15: mol_type = other DNA
ggctactatatacac

SEQ ID NO: 2791 - DNA, 15 bp, synthetic construct
  source 1..15: mol_type = other DNA
ggctactatatacac

SEQ ID NO: 2792 - DNA, 15 bp, synthetic construct
  source 1..15: mol_type = other DNA
ggctactatatacac

SEQ ID NO: 2793 - DNA, 15 bp, synthetic construct
  source 1..15: mol_type = other DNA
ggctactatatgcat

SEQ ID NO: 2794 - DNA, 15 bp, synthetic construct
  source 1..15: mol_type = other DNA
ggctactatatgcat

SEQ ID NO: 2795 - DNA, 15 bp, synthetic construct
  source 1..15: mol_type = other DNA
ggctactatatgcat

SEQ ID NO: 2796 - DNA, 15 bp, synthetic construct
  source 1..15: mol_type = other DNA
ggctactatatgcat

SEQ ID NO: 2797 - DNA, 15 bp, synthetic construct
  source 1..15: mol_type = other DNA
ggctactatatgcat

SEQ ID NO: 2798 - DNA, 15 bp, synthetic construct
  source 1..15: mol_type = other DNA
ggctactatatgcat

SEQ ID NO: 2799 - DNA, 15 bp, synthetic construct
  source 1..15: mol_type = other DNA
ggctactatatgcat

SEQ ID NO: 2800 - DNA, 15 bp, synthetic construct
  source 1..15: mol_type = other DNA
ggctactatatgcat

SEQ ID NO: 2801 - DNA, 15 bp, synthetic construct
  source 1..15: mol_type = other DNA
ggctactatatgcat

SEQ ID NO: 2802 - DNA, 15 bp, synthetic construct
  source 1..15: mol_type = other DNA
ggctactatatgcat

SEQ ID NO: 2803 - DNA, 15 bp, synthetic construct
  source 1..15: mol_type = other DNA
ggctactatatgcat

SEQ ID NO: 2804 - DNA, 15 bp, synthetic construct
  source 1..15: mol_type = other DNA
ggctactatatgcat

SEQ ID NO: 2805 - DNA, 15 bp, synthetic construct
  source 1..15: mol_type = other DNA
ggctactatatgcat

SEQ ID NO: 2806 - DNA, 15 bp, synthetic construct
  source 1..15: mol_type = other DNA
ggctactatatgcat

SEQ ID NO: 2807 - DNA, 15 bp, synthetic construct
  source 1..15: mol_type = other DNA
aactttggcatgcac

SEQ ID NO: 2808 - DNA, 15 bp, synthetic construct
  source 1..15: mol_type = other DNA
tactttggcatgcac

SEQ ID NO: 2809 - DNA, 15 bp, synthetic construct
  source 1..15: mol_type = other DNA
ggctactatatgcat

SEQ ID NO: 2810 - DNA, 15 bp, synthetic construct
  source 1..15: mol_type = other DNA
agctatggcatacac

SEQ ID NO: 2811 - DNA, 15 bp, synthetic construct
  source 1..15: mol_type = other DNA
agttatgatatcaac

SEQ ID NO: 2812 - DNA, 15 bp, synthetic construct
  source 1..15: mol_type = other DNA
agctatggcatacac

SEQ ID NO: 2813 - DNA, 15 bp, synthetic construct
  source 1..15: mol_type = other DNA
agctatggcatacac

SEQ ID NO: 2814 - DNA, 15 bp, synthetic construct
  source 1..15: mol_type = other DNA
agctatggcatacac

SEQ ID NO: 2815 - DNA, 15 bp, synthetic construct
  source 1..15: mol_type = other DNA
agctatggcatacac

SEQ ID NO: 2816 - DNA, 15 bp, synthetic construct
  source 1..15: mol_type = other DNA
agctatggcatacac

SEQ ID NO: 2817 - DNA, 15 bp, synthetic construct
  source 1..15: mol_type = other DNA
agctatggcatacac

SEQ ID NO: 2818 - DNA, 15 bp, synthetic construct
  source 1..15: mol_type = other DNA
agttatgatatcaac

SEQ ID NO: 2819 - DNA, 15 bp, synthetic construct
  source 1..15: mol_type = other DNA
agttatgatatcaac

SEQ ID NO: 2820 - DNA, 15 bp, synthetic construct
  source 1..15: mol_type = other DNA
agttatgatatcaac

SEQ ID NO: 2821 - DNA, 15 bp, synthetic construct
  source 1..15: mol_type = other DNA
agttatgatatcaac

SEQ ID NO: 2822 - DNA, 15 bp, synthetic construct
  source 1..15: mol_type = other DNA
agttatgatatcaac

SEQ ID NO: 2823 - DNA, 15 bp, synthetic construct
  source 1..15: mol_type = other DNA
agttatgatatcaac

SEQ ID NO: 2824 - DNA, 15 bp, synthetic construct
  source 1..15: mol_type = other DNA
agttatgatatcaac

SEQ ID NO: 2825 - DNA, 15 bp, synthetic construct
  source 1..15: mol_type = other DNA
agttatgatatcaac

SEQ ID NO: 2826 - DNA, 15 bp, synthetic construct
  source 1..15: mol_type = other DNA
agctatggcatacac

SEQ ID NO: 2827 - DNA, 51 bp, synthetic construct
  source 1..51: mol_type = other DNA
tggatcaaccctaacagtggtggcacaaactatgcacagaagtttcagggc

SEQ ID NO: 2828 - DNA, 51 bp, synthetic construct
  source 1..51: mol_type = other DNA
gttatatggtatgatggaagtaatgaaaactatgcagactccgtgaagggc

SEQ ID NO: 2829 - DNA, 51 bp, synthetic construct
  source 1..51: mol_type = other DNA
gttatatggtatgatggaagtaataaatactatgcagactccgtgaagggc

SEQ ID NO: 2830 - DNA, 51 bp, synthetic construct; identical to SEQ ID NO: 2829
  source 1..51: mol_type = other DNA

SEQ ID NO: 2831 - DNA, 51 bp, synthetic construct
  source 1..51: mol_type = other DNA
tggatcaaccctgacagtggtggcacagactattcacagaggtttcagggc

SEQ ID NO: 2832 - DNA, 51 bp, synthetic construct; identical to SEQ ID NO: 2831
  source 1..51: mol_type = other DNA

SEQ ID NO: 2833 - DNA, 51 bp, synthetic construct
  source 1..51: mol_type = other DNA
tggatcagccctaacagtggtgacacaagctatgcacagaagtttcaggac

SEQ ID NO: 2834 - DNA, 51 bp, synthetic construct
  source 1..51: mol_type = other DNA
tggataagccctaacaatggtgacacaaactatgcacagaagtttcaggac

SEQ ID NO: 2835 - DNA, 48 bp, synthetic construct
  source 1..48: mol_type = other DNA
tacatctattacagtgggagcacctactacaacccgtccctcaagagt

SEQ ID NO: 2836 - DNA, 51 bp, synthetic construct
  source 1..51: mol_type = other DNA
gctatatggtttgatggaagtgataaatactatgcagactccgtgaagggc

SEQ ID NO: 2837 - DNA, 51 bp, synthetic construct; identical to SEQ ID NO: 2829
  source 1..51: mol_type = other DNA

SEQ ID NO: 2838 - DNA, 51 bp, synthetic construct
  source 1..51: mol_type = other DNA
gctatatggtatgatggaaataataaatactatgcagactccgtgaagggc

SEQ ID NO: 2839 - DNA, 48 bp, synthetic construct
  source 1..48: mol_type = other DNA
cgtatctataccagtgggagcaccaactacaacccctccctcaagagt

SEQ ID NO: 2840 - DNA, 48 bp, synthetic construct; identical to SEQ ID NO: 2839
  source 1..48: mol_type = other DNA

SEQ ID NO: 2841 - DNA, 51 bp, synthetic construct
  source 1..51: mol_type = other DNA
gttatatggtatgatgcaagtaataaatactatgcagacgccgtgaagggc

SEQ ID NO: 2842 - DNA, 51 bp, synthetic construct
  source 1..51: mol_type = other DNA
gttatatggtatgatgcaagtaataaatactatgcagactccgtgaagggc

SEQ ID NO: 2843 - DNA, 51 bp, synthetic construct
  source 1..51: mol_type = other DNA
gttatatggtatgatggaagtaataaatactatgcagacgccgtgaagggc

SEQ ID NO: 2844 - DNA, 51 bp, synthetic construct; identical to SEQ ID NO: 2841
  source 1..51: mol_type = other DNA

SEQ ID NO: 2845 - DNA, 51 bp, synthetic construct; identical to SEQ ID NO: 2841
  source 1..51: mol_type = other DNA

SEQ ID NO: 2846 - DNA, 51 bp, synthetic construct; identical to SEQ ID NO: 2841
  source 1..51: mol_type = other DNA

SEQ ID NO: 2847 - DNA, 51 bp, synthetic construct
  source 1..51: mol_type = other DNA
gttatatggtatgatgcaagtaatgaaaactatgcagacgccgtgaagggc

SEQ ID NO: 2848 - DNA, 51 bp, synthetic construct; identical to SEQ ID NO: 2847
  source 1..51: mol_type = other DNA

SEQ ID NO: 2849 - DNA, 51 bp, synthetic construct; identical to SEQ ID NO: 2847
  source 1..51: mol_type = other DNA

SEQ ID NO: 2850 - DNA, 51 bp, synthetic construct
  source 1..51: mol_type = other DNA
gttatatggtatgatgcaagtaatgaaaactatgcagactccgtgaagggc

SEQ ID NO: 2851 - DNA, 51 bp, synthetic construct
  source 1..51: mol_type = other DNA
gttatatggtatgatggaagtaatgaaaactatgcagacgccgtgaagggc

SEQ ID NO: 2852 - DNA, 51 bp, synthetic construct; identical to SEQ ID NO: 2847
  source 1..51: mol_type = other DNA

SEQ ID NO: 2853 - DNA, 51 bp, synthetic construct; identical to SEQ ID NO: 2847
  source 1..51: mol_type = other DNA

SEQ ID NO: 2854 - DNA, 51 bp, synthetic construct; identical to SEQ ID NO: 2828
  source 1..51: mol_type = other DNA

SEQ ID NO: 2855 - DNA, 51 bp, synthetic construct; identical to SEQ ID NO: 2847
  source 1..51: mol_type = other DNA

SEQ ID NO: 2856 - DNA, 51 bp, synthetic construct; identical to SEQ ID NO: 2847
  source 1..51: mol_type = other DNA

SEQ ID NO: 2857 - DNA, 51 bp, synthetic construct; identical to SEQ ID NO: 2847
  source 1..51: mol_type = other DNA

SEQ ID NO: 2858 - DNA, 51 bp, synthetic construct; identical to SEQ ID NO: 2847
  source 1..51: mol_type = other DNA

SEQ ID NO: 2859 - DNA, 51 bp, synthetic construct; identical to SEQ ID NO: 2847
  source 1..51: mol_type = other DNA

SEQ ID NO: 2860 - DNA, 51 bp, synthetic construct; identical to SEQ ID NO: 2847
  source 1..51: mol_type = other DNA

SEQ ID NO: 2861 - DNA, 51 bp, synthetic construct; identical to SEQ ID NO: 2847
  source 1..51: mol_type = other DNA

SEQ ID NO: 2862 - DNA, 51 bp, synthetic construct; identical to SEQ ID NO: 2851
  source 1..51: mol_type = other DNA

SEQ ID NO: 2863 - DNA, 51 bp, synthetic construct; identical to SEQ ID NO: 2850
  source 1..51: mol_type = other DNA

SEQ ID NO: 2864 - DNA, 51 bp, synthetic construct; identical to SEQ ID NO: 2847
  source 1..51: mol_type = other DNA

SEQ ID NO: 2865 - DNA, 51 bp, synthetic construct; identical to SEQ ID NO: 2847
  source 1..51: mol_type = other DNA

SEQ ID NO: 2866 - DNA, 51 bp, synthetic construct; identical to SEQ ID NO: 2841
  source 1..51: mol_type = other DNA

SEQ ID NO: 2867 - DNA, 51 bp, synthetic construct; identical to SEQ ID NO: 2841
  source 1..51: mol_type = other DNA

SEQ ID NO: 2868 - DNA, 51 bp, synthetic construct; identical to SEQ ID NO: 2841
  source 1..51: mol_type = other DNA

SEQ ID NO: 2869 - DNA, 51 bp, synthetic construct; identical to SEQ ID NO: 2841
  source 1..51: mol_type = other DNA

SEQ ID NO: 2870 - DNA, 51 bp, synthetic construct; identical to SEQ ID NO: 2841
  source 1..51: mol_type = other DNA

SEQ ID NO: 2871 - DNA, 51 bp, synthetic construct; identical to SEQ ID NO: 2841
  source 1..51: mol_type = other DNA

SEQ ID NO: 2872 - DNA, 51 bp, synthetic construct; identical to SEQ ID NO: 2841
  source 1..51: mol_type = other DNA

SEQ ID NO: 2873 - DNA, 51 bp, synthetic construct; identical to SEQ ID NO: 2842
  source 1..51: mol_type = other DNA

SEQ ID NO: 2874 - DNA, 51 bp, synthetic construct; identical to SEQ ID NO: 2843
  source 1..51: mol_type = other DNA

SEQ ID NO: 2875 - DNA, 51 bp, synthetic construct; identical to SEQ ID NO: 2841
  source 1..51: mol_type = other DNA

SEQ ID NO: 2876 - DNA, 51 bp, synthetic construct; identical to SEQ ID NO: 2841
  source 1..51: mol_type = other DNA

SEQ ID NO: 2877 - DNA, 51 bp, synthetic construct; identical to SEQ ID NO: 2841
  source 1..51: mol_type = other DNA

SEQ ID NO: 2878 - DNA, 51 bp, synthetic construct; identical to SEQ ID NO: 2841
  source 1..51: mol_type = other DNA

SEQ ID NO: 2879 - DNA, 51 bp, synthetic construct; identical to SEQ ID NO: 2829
  source 1..51: mol_type = other DNA

SEQ ID NO: 2880 - DNA, 51 bp, synthetic construct; identical to SEQ ID NO: 2842
  source 1..51: mol_type = other DNA

SEQ ID NO: 2881 - DNA, 51 bp, synthetic construct; identical to SEQ ID NO: 2843
  source 1..51: mol_type = other DNA

SEQ ID NO: 2882 - DNA, 51 bp, synthetic construct
  source 1..51: mol_type = other DNA
gctatatggtatgatgcaaataataaatactatgcagacgccgtgaagggc

SEQ ID NO: 2883 - DNA, 51 bp, synthetic construct; identical to SEQ ID NO: 2882
  source 1..51: mol_type = other DNA

SEQ ID NO: 2884 - DNA, 51 bp, synthetic construct; identical to SEQ ID NO: 2882
  source 1..51: mol_type = other DNA

SEQ ID NO: 2885 - DNA, 51 bp, synthetic construct; identical to SEQ ID NO: 2882
  source 1..51: mol_type = other DNA

SEQ ID NO: 2886 - DNA, 51 bp, synthetic construct; identical to SEQ ID NO: 2882
  source 1..51: mol_type = other DNA

SEQ ID NO: 2887 - DNA, 51 bp, synthetic construct; identical to SEQ ID NO: 2882
  source 1..51: mol_type = other DNA

SEQ ID NO: 2888 - DNA, 51 bp, synthetic construct; identical to SEQ ID NO: 2882
  source 1..51: mol_type = other DNA

SEQ ID NO: 2889 - DNA, 51 bp, synthetic construct
  source 1..51: mol_type = other DNA
gctatatggtatgatggaaataataaatactatgcagacgccgtgaagggc

SEQ ID NO: 2890 - DNA, 51 bp, synthetic construct
  source 1..51: mol_type = other DNA
gctatatggtatgatgcaaataataaatactatgcagactccgtgaagggc

SEQ ID NO: 2891 - DNA, 51 bp, synthetic construct; identical to SEQ ID NO: 2882
  source 1..51: mol_type = other DNA

SEQ ID NO: 2892 - DNA, 51 bp, synthetic construct; identical to SEQ ID NO: 2882
  source 1..51: mol_type = other DNA

SEQ ID NO: 2893 - DNA, 51 bp, synthetic construct
  source 1..51: mol_type = other DNA
gttatatggtatgatgcaagtaataaatactatgaagacgccgtgaagggc

SEQ ID NO: 2894 - DNA, 51 bp, synthetic construct
  source 1..51: mol_type = other DNA
gttatatggtatgatggaagtaataaatactatgaagactccgtgaagggc

SEQ ID NO: 2895 - DNA, 51 bp, synthetic construct
  source 1..51: mol_type = other DNA
gttatatggtatgatggaagtaataaatactatgaagacgccgtgaagggc

SEQ ID NO: 2896 - DNA, 51 bp, synthetic construct
  source 1..51: mol_type = other DNA
gttatatggtatgatgcaagtaataaatactatgaagactccgtgaagggc

SEQ ID NO: 2897 - DNA, 51 bp, synthetic construct
  source 1..51: mol_type = other DNA
gctatatggtttgatgcaagtgataaatactatgcagacgccgtgaagggc

SEQ ID NO: 2898 - DNA, 51 bp, synthetic construct
  source 1..51: mol_type = other DNA
gctatatggtttgatgcaagtgataaatactatgcagactccgtgaagggc

SEQ ID NO: 2899 - DNA, 51 bp, synthetic construct
  source 1..51: mol_type = other DNA
gctatatggtttgatggaagtgataaatactatgcagacgccgtgaagggc

SEQ ID NO: 2900 - DNA, 51 bp, synthetic construct; identical to SEQ ID NO: 2897
  source 1..51: mol_type = other DNA

SEQ ID NO: 2901 - DNA, 51 bp, synthetic construct; identical to SEQ ID NO: 2897
  source 1..51: mol_type = other DNA

SEQ ID NO: 2902 - DNA, 51 bp, synthetic construct; identical to SEQ ID NO: 2897
  source 1..51: mol_type = other DNA

SEQ ID NO: 2903 - DNA, 51 bp, synthetic construct; identical to SEQ ID NO: 2897
  source 1..51: mol_type = other DNA

SEQ ID NO: 2904 - DNA, 51 bp, synthetic construct; identical to SEQ ID NO: 2897
  source 1..51: mol_type = other DNA

SEQ ID NO: 2905 - DNA, 48 bp, synthetic construct; identical to SEQ ID NO: 2835
  source 1..48: mol_type = other DNA

SEQ ID NO: 2906 - DNA, 48 bp, synthetic construct; identical to SEQ ID NO: 2835
  source 1..48: mol_type = other DNA

SEQ ID NO: 2907 - DNA, 48 bp, synthetic construct; identical to SEQ ID NO: 2835
  source 1..48: mol_type = other DNA

SEQ ID NO: 2908 - DNA, 48 bp, synthetic construct; identical to SEQ ID NO: 2835
  source 1..48: mol_type = other DNA

SEQ ID NO: 2909 - DNA, 48 bp, synthetic construct; identical to SEQ ID NO: 2835
  source 1..48: mol_type = other DNA

SEQ ID NO: 2910 - DNA, 48 bp, synthetic construct; identical to SEQ ID NO: 2835
  source 1..48: mol_type = other DNA

SEQ ID NO: 2911 - DNA, 48 bp, synthetic construct; identical to SEQ ID NO: 2835
  source 1..48: mol_type = other DNA

SEQ ID NO: 2912 - DNA, 51 bp, synthetic construct
  source 1..51: mol_type = other DNA
tggatcaaccctgaaagtggtggcacagactattcacagaggtttcagggc

SEQ ID NO: 2913 - DNA, 51 bp, synthetic construct; identical to SEQ ID NO: 2912
  source 1..51: mol_type = other DNA

SEQ ID NO: 2914 - DNA, 51 bp, synthetic construct
  source 1..51: mol_type = other DNA
tggatcaaccctgacgctggtggcacagactattcacagaggtttcagggc

SEQ ID NO: 2915 - DNA, 51 bp, synthetic construct; identical to SEQ ID NO: 2914
  source 1..51: mol_type = other DNA

SEQ ID NO: 2916 - DNA, 51 bp, synthetic construct; identical to SEQ ID NO: 2831
  source 1..51: mol_type = other DNA

SEQ ID NO: 2917 - DNA, 51 bp, synthetic construct; identical to SEQ ID NO: 2831
  source 1..51: mol_type = other DNA

SEQ ID NO: 2918 - DNA, 51 bp, synthetic construct; identical to SEQ ID NO: 2831
  source 1..51: mol_type = other DNA

SEQ ID NO: 2919 - DNA, 51 bp, synthetic construct; identical to SEQ ID NO: 2914
  source 1..51: mol_type = other DNA

SEQ ID NO: 2920 - DNA, 51 bp, synthetic construct; identical to SEQ ID NO: 2914
  source 1..51: mol_type = other DNA

SEQ ID NO: 2921 - DNA, 51 bp, synthetic construct; identical to SEQ ID NO: 2914
  source 1..51: mol_type = other DNA

SEQ ID NO: 2922 - DNA, 51 bp, synthetic construct; identical to SEQ ID NO: 2912
  source 1..51: mol_type = other DNA

SEQ ID NO: 2923 - DNA, 51 bp, synthetic construct
  source 1..51: mol_type = other DNA
tggatcagccctaacagtggtgaaacaagctatgcacagaagtttcaggac

SEQ ID NO: 2924 - DNA, 51 bp, synthetic construct; identical to SEQ ID NO: 2833
  source 1..51: mol_type = other DNA

SEQ ID NO: 2925 - DNA, 51 bp, synthetic construct; identical to SEQ ID NO: 2923
  source 1..51: mol_type = other DNA

SEQ ID NO: 2926 - DNA, 51 bp, synthetic construct; identical to SEQ ID NO: 2923
  source 1..51: mol_type = other DNA

SEQ ID NO: 2927 - DNA, 51 bp, synthetic construct; identical to SEQ ID NO: 2833
  source 1..51: mol_type = other DNA

SEQ ID NO: 2928 - DNA, 51 bp, synthetic construct; identical to SEQ ID NO: 2923
  source 1..51: mol_type = other DNA

SEQ ID NO: 2929 - DNA, 51 bp, synthetic construct; identical to SEQ ID NO: 2833
  source 1..51: mol_type = other DNA

SEQ ID NO: 2930 - DNA, 51 bp, synthetic construct; identical to SEQ ID NO: 2923
  source 1..51: mol_type = other DNA

SEQ ID NO: 2931 - DNA, 51 bp, synthetic construct; identical to SEQ ID NO: 2923
  source 1..51: mol_type = other DNA

SEQ ID NO: 2932 - DNA, 51 bp, synthetic construct; identical to SEQ ID NO: 2912
  source 1..51: mol_type = other DNA

SEQ ID NO: 2933 - DNA, 51 bp, synthetic construct; identical to SEQ ID NO: 2912
  source 1..51: mol_type = other DNA

SEQ ID NO: 2934 - DNA, 51 bp, synthetic construct; identical to SEQ ID NO: 2831
  source 1..51: mol_type = other DNA

SEQ ID NO: 2935 - DNA, 51 bp, synthetic construct; identical to SEQ ID NO: 2912
  source 1..51: mol_type = other DNA

SEQ ID NO: 2936 - DNA, 51 bp, synthetic construct; identical to SEQ ID NO: 2912
  source 1..51: mol_type = other DNA

SEQ ID NO: 2937 - DNA, 51 bp, synthetic construct
  source 1..51: mol_type = other DNA
tggataagccctaaccaaggtgaaacaaactatgcacagaagtttcaggac

SEQ ID NO: 2938 - DNA, 51 bp, synthetic construct
  source 1..51: mol_type = other DNA
tggataagccctaaccaaggtgacacaaactatgcacagaagtttcaggac

SEQ ID NO: 2939 - DNA, 51 bp, synthetic construct; identical to SEQ ID NO: 2937
  source 1..51: mol_type = other DNA

SEQ ID NO: 2940 - DNA, 51 bp, synthetic construct
  source 1..51: mol_type = other DNA
tggataagccctaacaatggtgaaacaaactatgcacagaagtttcaggac

SEQ ID NO: 2941 - DNA, 51 bp, synthetic construct; identical to SEQ ID NO: 2834
  source 1..51: mol_type = other DNA

SEQ ID NO: 2942 - DNA, 51 bp, synthetic construct; identical to SEQ ID NO: 2938
  source 1..51: mol_type = other DNA

SEQ ID NO: 2943 - DNA, 51 bp, synthetic construct; identical to SEQ ID NO: 2940
  source 1..51: mol_type = other DNA

SEQ ID NO: 2944 - DNA, 51 bp, synthetic construct; identical to SEQ ID NO: 2937
  source 1..51: mol_type = other DNA

SEQ ID NO: 2945 - DNA, 51 bp, synthetic construct; identical to SEQ ID NO: 2834
  source 1..51: mol_type = other DNA

SEQ ID NO: 2946 - DNA, 51 bp, synthetic construct; identical to SEQ ID NO: 2938
  source 1..51: mol_type = other DNA

SEQ ID NO: 2947 - DNA, 51 bp, synthetic construct; identical to SEQ ID NO: 2940
  source 1..51: mol_type = other DNA

SEQ ID NO: 2948 - DNA, 51 bp, synthetic construct; identical to SEQ ID NO: 2937
  source 1..51: mol_type = other DNA

SEQ ID NO: 2949 - DNA, 51 bp, synthetic construct; identical to SEQ ID NO: 2937
  source 1..51: mol_type = other DNA

SEQ ID NO: 2950 - DNA, 51 bp, synthetic construct; identical to SEQ ID NO: 2827
  source 1..51: mol_type = other DNA

SEQ ID NO: 2951 - DNA, 51 bp, synthetic construct; identical to SEQ ID NO: 2827
  source 1..51: mol_type = other DNA

SEQ ID NO: 2952 - DNA, 51 bp, synthetic construct; identical to SEQ ID NO: 2827
  source 1..51: mol_type = other DNA

SEQ ID NO: 2953 - DNA, 51 bp, synthetic construct; identical to SEQ ID NO: 2827
  source 1..51: mol_type = other DNA

SEQ ID NO: 2954 - DNA, 51 bp, synthetic construct; identical to SEQ ID NO: 2827
  source 1..51: mol_type = other DNA

SEQ ID NO: 2955 - DNA, 51 bp, synthetic construct; identical to SEQ ID NO: 2827
  source 1..51: mol_type = other DNA

SEQ ID NO: 2956 - DNA, 51 bp, synthetic construct; identical to SEQ ID NO: 2827
  source 1..51: mol_type = other DNA

SEQ ID NO: 2957 - DNA, 51 bp, synthetic construct; identical to SEQ ID NO: 2827
  source 1..51: mol_type = other DNA

SEQ ID NO: 2958 - DNA, 51 bp, synthetic construct; identical to SEQ ID NO: 2827
  source 1..51: mol_type = other DNA

SEQ ID NO: 2959 - DNA, 51 bp, synthetic construct; identical to SEQ ID NO: 2827
  source 1..51: mol_type = other DNA

SEQ ID NO: 2960 - DNA, 51 bp, synthetic construct; identical to SEQ ID NO: 2827
  source 1..51: mol_type = other DNA

SEQ ID NO: 2961 - DNA, 51 bp, synthetic construct; identical to SEQ ID NO: 2827
  source 1..51: mol_type = other DNA

SEQ ID NO: 2962 - DNA, 51 bp, synthetic construct; identical to SEQ ID NO: 2827
  source 1..51: mol_type = other DNA

SEQ ID NO: 2963 - DNA, 51 bp, synthetic construct; identical to SEQ ID NO: 2827
  source 1..51: mol_type = other DNA

SEQ ID NO: 2964 - DNA, 51 bp, synthetic construct; identical to SEQ ID NO: 2847
  source 1..51: mol_type = other DNA

SEQ ID NO: 2965 - DNA, 51 bp, synthetic construct; identical to SEQ ID NO: 2841
  source 1..51: mol_type = other DNA

SEQ ID NO: 2966 - DNA, 51 bp, synthetic construct; identical to SEQ ID NO: 2827
  source 1..51: mol_type = other DNA

SEQ ID NO: 2967 - DNA, 51 bp, synthetic construct
  source 1..51: mol_type = other DNA
gttatatggtatgatggaagtaataagttccatgcagactccgtgaagggc

SEQ ID NO: 2968 - DNA, 51 bp, synthetic construct
  source 1..51: mol_type = other DNA
tggatgaaccctaacagtggtaacacaggctatgcacagaagttccagggc

SEQ ID NO: 2969 - DNA, 51 bp, synthetic construct
  source 1..51: mol_type = other DNA
gttatatggtatgatgcaagtaataagttccatgcagacgccgtgaagggc

SEQ ID NO: 2970 - DNA, 51 bp, synthetic construct; identical to SEQ ID NO: 2969
  source 1..51: mol_type = other DNA

SEQ ID NO: 2971 - DNA, 51 bp, synthetic construct; identical to SEQ ID NO: 2969
  source 1..51: mol_type = other DNA

SEQ ID NO: 2972 - DNA, 51 bp, synthetic construct; identical to SEQ ID NO: 2969
  source 1..51: mol_type = other DNA

SEQ ID NO: 2973 - DNA, 51 bp, synthetic construct
  source 1..51: mol_type = other DNA
gttatatggtatgatgcaagtaataagttccatgcagactccgtgaagggc

SEQ ID NO: 2974 - DNA, 51 bp, synthetic construct
  source 1..51: mol_type = other DNA
gttatatggtatgatggaagtaataagttccatgcagacgccgtgaagggc

SEQ ID NO: 2975 - DNA, 51 bp, synthetic construct
  source 1..51: mol_type = other DNA
tggatgaaccctaacagtggtggcacaggctatgcacagaagttccagggc

SEQ ID NO: 2976 - DNA, 51 bp, synthetic construct; identical to SEQ ID NO: 2968
  source 1..51: mol_type = other DNA

SEQ ID NO: 2977 - DNA, 51 bp, synthetic construct; identical to SEQ ID NO: 2975
  source 1..51: mol_type = other DNA

SEQ ID NO: 2978 - DNA, 51 bp, synthetic construct; identical to SEQ ID NO: 2975
  source 1..51: mol_type = other DNA

SEQ ID NO: 2979 - DNA, 51 bp, synthetic construct; identical to SEQ ID NO: 2975
  source 1..51: mol_type = other DNA

SEQ ID NO: 2980 - DNA, 51 bp, synthetic construct; identical to SEQ ID NO: 2968
  source 1..51: mol_type = other DNA

SEQ ID NO: 2981 - DNA, 51 bp, synthetic construct; identical to SEQ ID NO: 2975
  source 1..51: mol_type = other DNA

SEQ ID NO: 2982 - DNA, 51 bp, synthetic construct; identical to SEQ ID NO: 2975
  source 1..51: mol_type = other DNA

SEQ ID NO: 2983 - DNA, 51 bp, synthetic construct; identical to SEQ ID NO: 2969
  source 1..51: mol_type = other DNA

SEQ ID NO: 2984 - DNA, 57 bp, synthetic construct
  source 1..57: mol_type = other DNA
gggggggattacgtttgggggacttatcggcctcactactactacggtatggacgtc

SEQ ID NO: 2985 - DNA, 36 bp, synthetic construct
  source 1..36: mol_type = other DNA
gatgggacgatctttggagtggtcttgggggactac

SEQ ID NO: 2986 - DNA, 36 bp, synthetic construct
  source 1..36: mol_type = other DNA
gatgggacgatttttggagtgctcttgggggactac

SEQ ID NO: 2987 - DNA, 33 bp, synthetic construct
  source 1..33: mol_type = other DNA
gataggacgatttttggagtggttcttgactac

SEQ ID NO: 2988 - DNA, 42 bp, synthetic construct
  source 1..42: mol_type = other DNA
gaggccacgatttttggaatggttattgtaccgtttgactac

SEQ ID NO: 2989 - DNA, 42 bp, synthetic construct; identical to SEQ ID NO: 2988
  source 1..42: mol_type = other DNA

SEQ ID NO: 2990 - DNA, 42 bp, synthetic construct
  source 1..42: mol_type = other DNA
gaggccacgatttttggaatgcttattgtaccatttgactac

SEQ ID NO: 2991 - DNA, 42 bp, synthetic construct; identical to SEQ ID NO: 2990
  source 1..42: mol_type = other DNA

SEQ ID NO: 2992 - DNA, 48 bp, synthetic construct
  source 1..48: mol_type = other DNA
gatcgtattacgatttttggagtggttatggggggcggtatggacgtc

SEQ ID NO: 2993 - DNA, 33 bp, synthetic construct
  source 1..33: mol_type = other DNA
gatcaggcgatttttggagtggtccccgactac

SEQ ID NO: 2994 - DNA, 36 bp, synthetic construct; identical to SEQ ID NO: 2986
  source 1..36: mol_type = other DNA

SEQ ID NO: 2995 - DNA, 33 bp, synthetic construct
  source 1..33: mol_type = other DNA
gatcggacgatttttggagtggtccttgagtac

SEQ ID NO: 2996 - DNA, 27 bp, synthetic construct
  source 1..27: mol_type = other DNA
gatgtagcagtggctggctttgactac

SEQ ID NO: 2997 - DNA, 27 bp, synthetic construct
  source 1..27: mol_type = other DNA
gatgtagcagtggctggctttgactac

SEQ ID NO: 2998 - DNA, 36 bp, synthetic construct; identical to SEQ ID NO: 2986
  source 1..36: mol_type = other DNA

SEQ ID NO: 2999 - DNA, 36 bp, synthetic construct; identical to SEQ ID NO: 2986
  source 1..36: mol_type = other DNA

SEQ ID NO: 3000 - DNA, 36 bp, synthetic construct; identical to SEQ ID NO: 2986
  source 1..36: mol_type = other DNA

SEQ ID NO: 3001 - DNA, 36 bp, synthetic construct; identical to SEQ ID NO: 2986
  source 1..36: mol_type = other DNA

SEQ ID NO: 3002 - DNA, 36 bp, synthetic construct; identical to SEQ ID NO: 2986
  source 1..36: mol_type = other DNA

SEQ ID NO: 3003 - DNA, 36 bp, synthetic construct
  source 1..36: mol_type = other DNA
gataggacgatttttggagtgctcttgggggactac

SEQ ID NO: 3004 - DNA, 36 bp, synthetic construct; identical to SEQ ID NO: 2985
  source 1..36: mol_type = other DNA

SEQ ID NO: 3005 - DNA, 36 bp, synthetic construct; identical to SEQ ID NO: 2985
  source 1..36: mol_type = other DNA

SEQ ID NO: 3006 - DNA, 36 bp, synthetic construct; identical to SEQ ID NO: 2985
  source 1..36: mol_type = other DNA

SEQ ID NO: 3007 - DNA, 36 bp, synthetic construct; identical to SEQ ID NO: 2985
  source 1..36: mol_type = other DNA

SEQ ID NO: 3008 - DNA, 36 bp, synthetic construct; identical to SEQ ID NO: 2985
  source 1..36: mol_type = other DNA

SEQ ID NO: 3009 - DNA, 36 bp, synthetic construct
  source 1..36: mol_type = other DNA
gataggacgatctttggagtggtcttgggggactac

SEQ ID NO: 3010 - DNA, 36 bp, synthetic construct; identical to SEQ ID NO: 2985
  source 1..36: mol_type = other DNA

SEQ ID NO: 3011 - DNA, 36 bp, synthetic construct; identical to SEQ ID NO: 2985
  source 1..36: mol_type = other DNA

SEQ ID NO: 3012 - DNA, 36 bp, synthetic construct; identical to SEQ ID NO: 2985
  source 1..36: mol_type = other DNA

SEQ ID NO: 3013 - DNA, 36 bp, synthetic construct; identical to SEQ ID NO: 2985
  source 1..36: mol_type = other DNA

SEQ ID NO: 3014 - DNA, 36 bp, synthetic construct; identical to SEQ ID NO: 2985
  source 1..36: mol_type = other DNA

SEQ ID NO: 3015 - DNA, 36 bp, synthetic construct; identical to SEQ ID NO: 2985
  source 1..36: mol_type = other DNA

SEQ ID NO: 3016 - DNA, 36 bp, synthetic construct; identical to SEQ ID NO: 2985
  source 1..36: mol_type = other DNA

SEQ ID NO: 3017 - DNA, 36 bp, synthetic construct; identical to SEQ ID NO: 2985
  source 1..36: mol_type = other DNA

SEQ ID NO: 3018 - DNA, 36 bp, synthetic construct; identical to SEQ ID NO: 2985
  source 1..36: mol_type = other DNA

SEQ ID NO: 3019 - DNA, 36 bp, synthetic construct; identical to SEQ ID NO: 2985
  source 1..36: mol_type = other DNA

SEQ ID NO: 3020 - DNA, 36 bp, synthetic construct; identical to SEQ ID NO: 2985
  source 1..36: mol_type = other DNA

SEQ ID NO: 3021 - DNA, 36 bp, synthetic construct; identical to SEQ ID NO: 3009
  source 1..36: mol_type = other DNA

SEQ ID NO: 3022 - DNA, 36 bp, synthetic construct; identical to SEQ ID NO: 2985
  source 1..36: mol_type = other DNA

SEQ ID NO: 3023 - DNA, 33 bp, synthetic construct; identical to SEQ ID NO: 2987
  source 1..33: mol_type = other DNA

SEQ ID NO: 3024 - DNA, 33 bp, synthetic construct; identical to SEQ ID NO: 2987
  source 1..33: mol_type = other DNA

SEQ ID NO: 3025 - DNA, 33 bp, synthetic construct; identical to SEQ ID NO: 2987
  source 1..33: mol_type = other DNA

SEQ ID NO: 3026 - DNA, 33 bp, synthetic construct; identical to SEQ ID NO: 2987
  source 1..33: mol_type = other DNA

SEQ ID NO: 3027 - DNA, 33 bp, synthetic construct; identical to SEQ ID NO: 2987
  source 1..33: mol_type = other DNA

SEQ ID NO: 3028 - DNA, 33 bp, synthetic construct; identical to SEQ ID NO: 2987
  source 1..33: mol_type = other DNA

SEQ ID NO: 3029 - DNA, 33 bp, synthetic construct; identical to SEQ ID NO: 2987
  source 1..33: mol_type = other DNA

SEQ ID NO: 3030 - DNA, 33 bp, synthetic construct; identical to SEQ ID NO: 2987
  source 1..33: mol_type = other DNA

SEQ ID NO: 3031 - DNA, 33 bp, synthetic construct; identical to SEQ ID NO: 2987
  source 1..33: mol_type = other DNA

SEQ ID NO: 3032 - DNA, 36 bp, synthetic construct; identical to SEQ ID NO: 2986
  source 1..36: mol_type = other DNA

SEQ ID NO: 3033 - DNA, 36 bp, synthetic construct; identical to SEQ ID NO: 3003
  source 1..36: mol_type = other DNA

SEQ ID NO: 3034 - DNA, 36 bp, synthetic construct; identical to SEQ ID NO: 2986
  source 1..36: mol_type = other DNA

SEQ ID NO: 3035 - DNA, 36 bp, synthetic construct; identical to SEQ ID NO: 3003
  source 1..36: mol_type = other DNA

SEQ ID NO: 3036 - DNA, 36 bp, synthetic construct; identical to SEQ ID NO: 2986
  source 1..36: mol_type = other DNA

SEQ ID NO: 3037 - DNA, 36 bp, synthetic construct; identical to SEQ ID NO: 2986
  source 1..36: mol_type = other DNA

SEQ ID NO: 3038 - DNA, 36 bp, synthetic construct; identical to SEQ ID NO: 2986
  source 1..36: mol_type = other DNA

SEQ ID NO: 3039 - DNA, 33 bp, synthetic construct; identical to SEQ ID NO: 2995
  source 1..33: mol_type = other DNA

SEQ ID NO: 3040 - DNA, 33 bp, synthetic construct; identical to SEQ ID NO: 2995
  source 1..33: mol_type = other DNA

SEQ ID NO: 3041 - DNA, 33 bp, synthetic construct; identical to SEQ ID NO: 2995
  source 1..33: mol_type = other DNA

SEQ ID NO: 3042 - DNA, 33 bp, synthetic construct; identical to SEQ ID NO: 2995
  source 1..33: mol_type = other DNA

SEQ ID NO: 3043 - DNA, 33 bp, synthetic construct; identical to SEQ ID NO: 2995
  source 1..33: mol_type = other DNA

SEQ ID NO: 3044 - DNA, 33 bp, synthetic construct; identical to SEQ ID NO: 2995
  source 1..33: mol_type = other DNA

SEQ ID NO: 3045 - DNA, 33 bp, synthetic construct; identical to SEQ ID NO: 2995
  source 1..33: mol_type = other DNA

SEQ ID NO: 3046 - DNA, 33 bp, synthetic construct; identical to SEQ ID NO: 2995
  source 1..33: mol_type = other DNA

SEQ ID NO: 3047 - DNA, 33 bp, synthetic construct; identical to SEQ ID NO: 2995
  source 1..33: mol_type = other DNA

SEQ ID NO: 3048 - DNA, 33 bp, synthetic construct; identical to SEQ ID NO: 2995
  source 1..33: mol_type = other DNA

SEQ ID NO: 3049 - DNA, 33 bp, synthetic construct; identical to SEQ ID NO: 2995
  source 1..33: mol_type = other DNA

SEQ ID NO: 3050 - DNA, 33 bp, synthetic construct
  source 1..33: mol_type = other DNA
gggattacgatttttggtcatgggtttgaatat

SEQ ID NO: 3051 - DNA, 33 bp, synthetic construct; identical to SEQ ID NO: 3050
  source 1..33: mol_type = other DNA

SEQ ID NO: 3052 - DNA, 33 bp, synthetic construct; identical to SEQ ID NO: 3050
  source 1..33: mol_type = other DNA

SEQ ID NO: 3053 - DNA, 33 bp, synthetic construct; identical to SEQ ID NO: 3050
  source 1..33: mol_type = other DNA

SEQ ID NO: 3054 - DNA, 33 bp, synthetic construct; identical to SEQ ID NO: 2993
  source 1..33: mol_type = other DNA

SEQ ID NO: 3055 - DNA, 33 bp, synthetic construct; identical to SEQ ID NO: 2993
  source 1..33: mol_type = other DNA

SEQ ID NO: 3056 - DNA, 33 bp, synthetic construct; identical to SEQ ID NO: 2993
  source 1..33: mol_type = other DNA

SEQ ID NO: 3057 - DNA, 33 bp, synthetic construct; identical to SEQ ID NO: 2993
  source 1..33: mol_type = other DNA

SEQ ID NO: 3058 - DNA, 33 bp, synthetic construct; identical to SEQ ID NO: 2993
  source 1..33: mol_type = other DNA

SEQ ID NO: 3059 - DNA, 33 bp, synthetic construct; identical to SEQ ID NO: 2993
  source 1..33: mol_type = other DNA

SEQ ID NO: 3060 - DNA, 33 bp, synthetic construct; identical to SEQ ID NO: 2993
  source 1..33: mol_type = other DNA

SEQ ID NO: 3061 - DNA, 33 bp, synthetic construct; identical to SEQ ID NO: 2993
  source 1..33: mol_type = other DNA

SEQ ID NO: 3062 - DNA, 48 bp, synthetic construct; identical to SEQ ID NO: 2992
  source 1..48: mol_type = other DNA

SEQ ID NO: 3063 - DNA, 48 bp, synthetic construct; identical to SEQ ID NO: 2992
  source 1..48: mol_type = other DNA

SEQ ID NO: 3064 - DNA, 48 bp, synthetic construct; identical to SEQ ID NO: 2992
  source 1..48: mol_type = other DNA

SEQ ID NO: 3065 - DNA, 48 bp, synthetic construct; identical to SEQ ID NO: 2992
  source 1..48: mol_type = other DNA

SEQ ID NO: 3066 - DNA, 48 bp, synthetic construct; identical to SEQ ID NO: 2992
  source 1..48: mol_type = other DNA

SEQ ID NO: 3067 - DNA, 48 bp, synthetic construct; identical to SEQ ID NO: 2992
  source 1..48: mol_type = other DNA

SEQ ID NO: 3068 - DNA, 48 bp, synthetic construct; identical to SEQ ID NO: 2992
  source 1..48: mol_type = other DNA

SEQ ID NO: 3069 - DNA, 42 bp, synthetic construct; identical to SEQ ID NO: 2988
  source 1..42: mol_type = other DNA

SEQ ID NO: 3070 - DNA, 42 bp, synthetic construct; identical to SEQ ID NO: 2988
  source 1..42: mol_type = other DNA

SEQ ID NO: 3071 - DNA, 42 bp, synthetic construct; identical to SEQ ID NO: 2988
  source 1..42: mol_type = other DNA

SEQ ID NO: 3072 - DNA, 42 bp, synthetic construct; identical to SEQ ID NO: 2988
  source 1..42: mol_type = other DNA

SEQ ID NO: 3073 - DNA, 42 bp, synthetic construct; identical to SEQ ID NO: 2988
  source 1..42: mol_type = other DNA

SEQ ID NO: 3074 - DNA, 42 bp, synthetic construct; identical to SEQ ID NO: 2988
  source 1..42: mol_type = other DNA

SEQ ID NO: 3075 - DNA, 42 bp, synthetic construct; identical to SEQ ID NO: 2988
  source 1..42: mol_type = other DNA

SEQ ID NO: 3076 - DNA, 42 bp, synthetic construct; identical to SEQ ID NO: 2988
  source 1..42: mol_type = other DNA

SEQ ID NO: 3077 - DNA, 42 bp, synthetic construct; identical to SEQ ID NO: 2988
  source 1..42: mol_type = other DNA

SEQ ID NO: 3078 - DNA, 42 bp, synthetic construct; identical to SEQ ID NO: 2988
  source 1..42: mol_type = other DNA

SEQ ID NO: 3079 - DNA, 42 bp, synthetic construct; identical to SEQ ID NO: 2988
  source 1..42: mol_type = other DNA

SEQ ID NO: 3080 - DNA, 42 bp, synthetic construct; identical to SEQ ID NO: 2990
  source 1..42: mol_type = other DNA

SEQ ID NO: 3081 - DNA, 42 bp, synthetic construct; identical to SEQ ID NO: 2990
  source 1..42: mol_type = other DNA

SEQ ID NO: 3082 - DNA, 42 bp, synthetic construct; identical to SEQ ID NO: 2990
  source 1..42: mol_type = other DNA

SEQ ID NO: 3083 - DNA, 42 bp, synthetic construct; identical to SEQ ID NO: 2990
  source 1..42: mol_type = other DNA

SEQ ID NO: 3084 - DNA, 42 bp, synthetic construct; identical to SEQ ID NO: 2990
  source 1..42: mol_type = other DNA

SEQ ID NO: 3085 - DNA, 42 bp, synthetic construct; identical to SEQ ID NO: 2990
  source 1..42: mol_type = other DNA

SEQ ID NO: 3086 - DNA, 42 bp, synthetic construct; identical to SEQ ID NO: 2990
  source 1..42: mol_type = other DNA

SEQ ID NO: 3087 - DNA, 42 bp, synthetic construct; identical to SEQ ID NO: 2990
  source 1..42: mol_type = other DNA

SEQ ID NO: 3088 - DNA, 42 bp, synthetic construct; identical to SEQ ID NO: 2990
  source 1..42: mol_type = other DNA

SEQ ID NO: 3089 - DNA, 42 bp, synthetic construct; identical to SEQ ID NO: 2988
  source 1..42: mol_type = other DNA

SEQ ID NO: 3090 - DNA, 42 bp, synthetic construct; identical to SEQ ID NO: 2988
  source 1..42: mol_type = other DNA

SEQ ID NO: 3091 - DNA, 42 bp, synthetic construct; identical to SEQ ID NO: 2988
  source 1..42: mol_type = other DNA

SEQ ID NO: 3092 - DNA, 42 bp, synthetic construct; identical to SEQ ID NO: 2988
  source 1..42: mol_type = other DNA

SEQ ID NO: 3093 - DNA, 42 bp, synthetic construct; identical to SEQ ID NO: 2988
  source 1..42: mol_type = other DNA

SEQ ID NO: 3094 - DNA, 42 bp, synthetic construct; identical to SEQ ID NO: 2990
  source 1..42: mol_type = other DNA

SEQ ID NO: 3095 - DNA, 42 bp, synthetic construct; identical to SEQ ID NO: 2990
  source 1..42: mol_type = other DNA

SEQ ID NO: 3096 - DNA, 42 bp, synthetic construct; identical to SEQ ID NO: 2990
  source 1..42: mol_type = other DNA

SEQ ID NO: 3097 - DNA, 42 bp, synthetic construct; identical to SEQ ID NO: 2990
  source 1..42: mol_type = other DNA

SEQ ID NO: 3098 - DNA, 42 bp, synthetic construct; identical to SEQ ID NO: 2990
  source 1..42: mol_type = other DNA

SEQ ID NO: 3099 - DNA, 42 bp, synthetic construct; identical to SEQ ID NO: 2990
  source 1..42: mol_type = other DNA

SEQ ID NO: 3100 - DNA, 42 bp, synthetic construct; identical to SEQ ID NO: 2990
  source 1..42: mol_type = other DNA

SEQ ID NO: 3101 - DNA, 42 bp, synthetic construct; identical to SEQ ID NO: 2990
  source 1..42: mol_type = other DNA

SEQ ID NO: 3102 - DNA, 42 bp, synthetic construct; identical to SEQ ID NO: 2990
  source 1..42: mol_type = other DNA

SEQ ID NO: 3103 - DNA, 42 bp, synthetic construct; identical to SEQ ID NO: 2990
  source 1..42: mol_type = other DNA

SEQ ID NO: 3104 - DNA, 42 bp, synthetic construct; identical to SEQ ID NO: 2990
  source 1..42: mol_type = other DNA

SEQ ID NO: 3105 - DNA, 42 bp, synthetic construct; identical to SEQ ID NO: 2990
  source 1..42: mol_type = other DNA

SEQ ID NO: 3106 - DNA, 42 bp, synthetic construct; identical to SEQ ID NO: 2990
  source 1..42: mol_type = other DNA

SEQ ID NO: 3107 - DNA, 57 bp, synthetic construct; identical to SEQ ID NO: 2984
  source 1..57: mol_type = other DNA

SEQ ID NO: 3108 - DNA, 57 bp, synthetic construct; identical to SEQ ID NO: 2984
  source 1..57: mol_type = other DNA

SEQ ID NO: 3109 - DNA, 57 bp, synthetic construct; identical to SEQ ID NO: 2984
  source 1..57: mol_type = other DNA

SEQ ID NO: 3110 - DNA, 57 bp, synthetic construct; identical to SEQ ID NO: 2984
  source 1..57: mol_type = other DNA

SEQ ID NO: 3111 - DNA, 57 bp, synthetic construct; identical to SEQ ID NO: 2984
  source 1..57: mol_type = other DNA

SEQ ID NO: 3112 - DNA, 57 bp, synthetic construct; identical to SEQ ID NO: 2984
  source 1..57: mol_type = other DNA

SEQ ID NO: 3113 - DNA, 57 bp, synthetic construct; identical to SEQ ID NO: 2984
  source 1..57: mol_type = other DNA

SEQ ID NO: 3114 - DNA, 57 bp, synthetic construct; identical to SEQ ID NO: 2984
  source 1..57: mol_type = other DNA

SEQ ID NO: 3115 - DNA, 57 bp, synthetic construct; identical to SEQ ID NO: 2984
  source 1..57: mol_type = other DNA

SEQ ID NO: 3116 - DNA, 57 bp, synthetic construct; identical to SEQ ID NO: 2984
  source 1..57: mol_type = other DNA

SEQ ID NO: 3117 - DNA, 57 bp, synthetic construct; identical to SEQ ID NO: 2984
  source 1..57: mol_type = other DNA

SEQ ID NO: 3118 - DNA, 57 bp, synthetic construct; identical to SEQ ID NO: 2984
  source 1..57: mol_type = other DNA

SEQ ID NO: 3119 - DNA, 57 bp, synthetic construct
  source 1..57: mol_type = other DNA
gggggggattacgttttcgggacttatcggcctcactactactacggtatggacgtc

SEQ ID NO: 3120 - DNA, 57 bp, synthetic construct; identical to SEQ ID NO: 3119
  source 1..57: mol_type = other DNA

SEQ ID NO: 3121 - DNA, 36 bp, synthetic construct; identical to SEQ ID NO: 3009
  source 1..36: mol_type = other DNA

SEQ ID NO: 3122 - DNA, 36 bp, synthetic construct; identical to SEQ ID NO: 3003
  source 1..36: mol_type = other DNA

SEQ ID NO: 3123 - DNA, 57 bp, synthetic construct; identical to SEQ ID NO: 2984
  source 1..57: mol_type = other DNA

SEQ ID NO: 3124 - DNA, 36 bp, synthetic construct
  source 1..36: mol_type = other DNA
ggaaaagtggctggtatgcctgaagcttttgaaatc

SEQ ID NO: 3125 - DNA, 60 bp, synthetic construct
  source 1..60: mol_type = other DNA
gggggtgattacgtttgggggagttatcgtccctactactactactacggtatggacgtc

SEQ ID NO: 3126 - DNA, 36 bp, synthetic construct; identical to SEQ ID NO: 3124
  source 1..36: mol_type = other DNA

SEQ ID NO: 3127 - DNA, 36 bp, synthetic construct; identical to SEQ ID NO: 3124
  source 1..36: mol_type = other DNA

SEQ ID NO: 3128 - DNA, 36 bp, synthetic construct; identical to SEQ ID NO: 3124
  source 1..36: mol_type = other DNA

SEQ ID NO: 3129 - DNA, 36 bp, synthetic construct; identical to SEQ ID NO: 3124
  source 1..36: mol_type = other DNA

SEQ ID NO: 3130 - DNA, 36 bp, synthetic construct; identical to SEQ ID NO: 3124
  source 1..36: mol_type = other DNA

SEQ ID NO: 3131 - DNA, 36 bp, synthetic construct; identical to SEQ ID NO: 3124
  source 1..36: mol_type = other DNA

SEQ ID NO: 3132 - DNA, 60 bp, synthetic construct; identical to SEQ ID NO: 3125
  source 1..60: mol_type = other DNA

SEQ ID NO: 3133 - DNA, 60 bp, synthetic construct; identical to SEQ ID NO: 3125
  source 1..60: mol_type = other DNA

SEQ ID NO: 3134 - DNA, 60 bp, synthetic construct; identical to SEQ ID NO: 3125
  source 1..60: mol_type = other DNA

SEQ ID NO: 3135 - DNA, 60 bp, synthetic construct; identical to SEQ ID NO: 3125
  source 1..60: mol_type = other DNA

SEQ ID NO: 3136 - DNA, 60 bp, synthetic construct; identical to SEQ ID NO: 3125
  source 1..60: mol_type = other DNA

SEQ ID NO: 3137 - DNA, 60 bp, synthetic construct; identical to SEQ ID NO: 3125
  source 1..60: mol_type = other DNA

SEQ ID NO: 3138 - DNA, 60 bp, synthetic construct
  source 1..60: mol_type = other DNA
gggggtgattacgttttcgggagttatcgtccctactactactactacggtatggacgtc

SEQ ID NO: 3139 - DNA, 60 bp, synthetic construct; identical to SEQ ID NO: 3138
  source 1..60: mol_type = other DNA

SEQ ID NO: 3140 - DNA, 36 bp, synthetic construct; identical to SEQ ID NO: 3124
  source 1..36: mol_type = other DNA

SEQ ID NO: 3141 - protein, 466 aa, Homo sapiens
MTTSPILQLLLRLSLCGLLLQRAETGSKGQTAGELYQRWERYRRECQETLAAAEPPSGLACNGSFDMYVCWDYAAPNATARASCPWYLPWHHHVAAGFVLRQCGSDGQWGLWRDHTQCENPEKNEAFLDQRLILERLQVMYTVGYSLSLATLLLALLILSLFRRLHCTRNYIHINLFTSFMLRAAAILSRDRLLPRPGPYLGDQALALWNQALAACRTAQIVTQYCVGANYTWLLVEGVYLHSLLVLVGGSEEGHFRYYLLLGWGAPALFVIPWVIVRYLYENTQCWERNEVKAIWWIIRTPILMTILINFLIFIRILGILLSKLRTRQMRCRDYRLRLARSTLTLVPLLGVHEVVFAPVTEEQARGALRFAKLGFEIFLSSFQGFLVSVLYCFINKEVQSEIRRGWHHCRLRRSLGEEQRQLPERAFRALPSGSGPGEVPTSRGLSSGTLPGPGNEASRELESYC

SEQ ID NO: 3142 - DNA, 2024 bp, Homo sapiens
  source 1..2024: mol_type = other DNA
ggcagcggtggcaggggctgcaggagcaagtgaccaggagcaggactggggacaggcctgatcgcccctgcacgaaccagacccttcgccgccctcacgatgactacctctccgatcctgcagctgctgctgcggctctcactgtgcgggctgctgctccagagggcggagacaggctctaaggggcagacggcgggggagctgtaccagcgctgggaacggtaccgcagggagtgccaggagaccttggcagccgcggaaccgccttcaggcctcgcctgtaacgggtccttcgatatgtacgtctgctgggactatgctgcacccaatgccactgcccgtgcgtcctgcccctggtacctgccctggcaccaccatgtggctgcaggtttcgtcctccgccagtgtggcagtgatggccaatggggactttggagagaccatacacaatgtgagaacccagagaagaatgaggcctttctggaccaaaggctcatcttggagcggttgcaggtcatgtacactgtcggctactccctgtctctcgccacactgctgctagccctgctcatcttgagtttgttcaggcggctacattgcactagaaactatatccacatcaacctgttcacgtctttcatgctgcgagctgcggccattctcagccgagaccgtctgctacctcgacctggcccctaccttggggaccaggcccttgcgctgtggaaccaggccctcgctgcctgccgcacggcccagatcgtgacccagtactgcgtgggtgccaactacacgtggctgctggtggagggcgtctacctgcacagtctcctggtgctcgtgggaggctccgaggagggccacttccgctactacctgctcctcggctggggggcccccgcgcttttcgtcattccctgggtgatcgtcaggtacctgtacgagaacacgcagtgctgggagcgcaacgaagtcaaggccatttggtggattatacggacccccatcctcatgaccatcttgattaatttcctcatttttatccgcattcttggcattctcctgtccaagctgaggacacggcaaatgcgctgccgggattaccggctgaggctggctcgctccacgctgacgctggtgcccctgctgggtgtccacgaggtggtgtttgctcccgtgacagaggaacaggcccggggcgccctgcgcttcgccaagctcggctttgagatcttcctcagctccttccagggcttcctggtcagcgtcctctactgcttcatcaacaaggaggtgcagtcggagatccgccgtggctggcaccactgccgcctgcgccgcagcctgggcgaggagcaacgccagctcccggagcgcgccttccgggccctgccctccggctccggcccgggcgaggtccccaccagccgcggcttgtcctcggggaccctcccagggcctgggaatgaggccagccgggagttggaaagttactgctagggggcgggatccccgtgtctgttcagttagcatggatttattgagtgccaactgcgtgccaggcccagtacggaggacgctggggaaatggtgaaggaaacagaaaaaaggtccctgcccttctggagatgacaactgagtggggaaaacagaccgtgaacacaaaacatcaagttccacacacgctatggaatggttatgaagggaagcgagaagggggcctagggtggtctgggaggcgtctccaaggaggtgacacttaagccatccccgaaagaggtgaaagagatcactttggggagagctggagaacaggattctaggcggaagcgatagcataggcaaaggcccttgggcaggaaggcgctcagccttggctggagtagaattaagtcagagccaacaggtggggagagacagagaagtgggcaggggcacccaagttgggatttcatttcaggtgcattggagattcttaggagtgtctcttgggggtaatattttattttttaaaaaatgaggat

SEQ ID NO: 3143 - protein, 430 aa, Homo sapiens
MTTSPILQLLLRLSLCGLLLQRAETGSKGQTAGELYQRWERYRRECQETLAAAEPPSVAAGFVLRQCGSDGQWGLWRDHTQCENPEKNEAFLDQRLILERLQVMYTVGYSLSLATLLLALLILSLFRRLHCTRNYIHINLFTSFMLRAAAILSRDRLLPRPGPYLGDQALALWNQALAACRTAQIVTQYCVGANYTWLLVEGVYLHSLLVLVGGSEEGHFRYYLLLGWGAPALFVIPWVIVRYLYENTQCWERNEVKAIWWIIRTPILMTILINFLIFIRILGILLSKLRTRQMRCRDYRLRLARSTLTLVPLLGVHEVVFAPVTEEQARGALRFAKLGFEIFLSSFQGFLVSVLYCFINKEVQSEIRRGWHHCRLRRSLGEEQRQLPERAFRALPSGSGPGEVPTSRGLSSGTLPGPGNEASRELESYC

SEQ ID NO: 3144 - DNA, 1290 bp, Homo sapiens
  source 1..1290: mol_type = other DNA
atgaccaccagcccgattctgcagctgctgctgcgcctgagcctgtgcggcctgctgctgcagcgcgcggaaaccggcagcaaaggccagaccgcgggcgaactgtatcagcgctgggaacgctatcgccgcgaatgccaggaaaccctggcggcggcggaaccgccgagcgtggcggcgggctttgtgctgcgccagtgcggcagcgatggccagtggggcctgtggcgcgatcatacccagtgcgaaaacccggaaaaaaacgaagcgtttctggatcagcgcctgattctggaacgcctgcaggtgatgtataccgtgggctatagcctgagcctggcgaccctgctgctggcgctgctgattctgagcctgtttcgccgcctgcattgcacccgcaactatattcatattaacctgtttaccagctttatgctgcgcgcggcggcgattctgagccgcgatcgcctgctgccgcgcccgggcccgtatctgggcgatcaggcgctggcgctgtggaaccaggcgctggcggcgtgccgcaccgcgcagattgtgacccagtattgcgtgggcgcgaactatacctggctgctggtggaaggcgtgtatctgcatagcctgctggtgctggtgggcggcagcgaagaaggccattttcgctattatctgctgctgggctggggcgcgccggcgctgtttgtgattccgtgggtgattgtgcgctatctgtatgaaaacacccagtgctgggaacgcaacgaagtgaaagcgatttggtggattattcgcaccccgattctgatgaccattctgattaactttctgatttttattcgcattctgggcattctgctgagcaaactgcgcacccgccagatgcgctgccgcgattatcgcctgcgcctggcgcgcagcaccctgaccctggtgccgctgctgggcgtgcatgaagtggtgtttgcgccggtgaccgaagaacaggcgcgcggcgcgctgcgctttgcgaaactgggctttgaaatttttctgagcagctttcagggctttctggtgagcgtgctgtattgctttattaacaaagaagtgcagagcgaaattcgccgcggctggcatcattgccgcctgcgccgcagcctgggcgaagaacagcgccagctgccggaacgcgcgtttcgcgcgctgccgagcggcagcggcccgggcgaagtgccgaccagccgcggcctgagcagcggcaccctgccgggcccgggcaacgaagcgagccgcgaactggaaagctattgc

SEQ ID NO: 3145 - protein, 493 aa, Homo sapiens
MTTSPILQLLLRLSLCGLLLQRAETGSKGQTAGELYQRWERYRRECQETLAAAEPPSGLACNGSFDMYVCWDYAAPNATARASCPWYLPWHHHVAAGFVLRQCGSDGQWGLWRDHTQCENPEKNEAFLDQRLILERLQVMYTVGYSLSLATLLLALLILSLFRRLHCTRNYIHINLFTSFMLRAAAILSRDRLLPRPGPYLGDQALALWNQALAACRTAQIVTQYCVGANYTWLLVEGVYLHSLLVLVGGSEEGHFRYYLLLGWGAPALFVIPWVIVRYLYENTQCWERNEVKAIWWIIRTPILMTILINFLIFIRILGILLSKLRTRQMRCRDYRLRLARSTLTLVPLLGVHEVVFAPVTEEQARGALRFAKLGFEIFLSSFQGFLVSVLYCFINKEVGRDPAAAPALWRRRGTAPPLSAIVSQVQSEIRRGWHHCRLRRSLGEEQRQLPERAFRALPSGSGPGEVPTSRGLSSGTLPGPGNEASRELESYC

SEQ ID NO: 3146 - DNA, 1482 bp, Homo sapiens
  source 1..1482: mol_type = other DNA
atgaccaccagcccgattctgcagctgctgctgcgcctgagcctgtgcggcctgctgctgcagcgcgcggaaaccggcagcaaaggccagaccgcgggcgaactgtatcagcgctgggaacgctatcgccgcgaatgccaggaaaccctggcggcggcggaaccgccgagcggcctggcgtgcaacggcagctttgatatgtatgtgtgctgggattatgcggcgccgaacgcgaccgcgcgcgcgagctgcccgtggtatctgccgtggcatcatcatgtggcggcgggctttgtgctgcgccagtgcggcagcgatggccagtggggcctgtggcgcgatcatacccagtgcgaaaacccggaaaaaaacgaagcgtttctggatcagcgcctgattctggaacgcctgcaggtgatgtataccgtgggctatagcctgagcctggcgaccctgctgctggcgctgctgattctgagcctgtttcgccgcctgcattgcacccgcaactatattcatattaacctgtttaccagctttatgctgcgcgcggcggcgattctgagccgcgatcgcctgctgccgcgcccgggcccgtatctgggcgatcaggcgctggcgctgtggaaccaggcgctggcggcgtgccgcaccgcgcagattgtgacccagtattgcgtgggcgcgaactatacctggctgctggtggaaggcgtgtatctgcatagcctgctggtgctggtgggcggcagcgaagaaggccattttcgctattatctgctgctgggctggggcgcgccggcgctgtttgtgattccgtgggtgattgtgcgctatctgtatgaaaacacccagtgctgggaacgcaacgaagtgaaagcgatttggtggattattcgcaccccgattctgatgaccattctgattaactttctgatttttattcgcattctgggcattctgctgagcaaactgcgcacccgccagatgcgctgccgcgattatcgcctgcgcctggcgcgcagcaccctgaccctggtgccgctgctgggcgtgcatgaagtggtgtttgcgccggtgaccgaagaacaggcgcgcggcgcgctgcgctttgcgaaactgggctttgaaatttttctgagcagctttcagggctttctggtgagcgtgctgtattgctttattaacaaagaagtgggccgcgatccggcggcggcgccggcgctgtggcgccgccgcggcaccgcgccgccgctgagcgcgattgtgagccaggtgcagagcgaaattcgccgcggctggcatcattgccgcctgcgccgcagcctgggcgaagaacagcgccagctgccggaacgcgcgtttcgcgcgctgccgagcggcagcggcccgggcgaagtgccgaccagccgcggcctgagcagcggcaccctgccgggcccgggcaacgaagcgagccgcgaactggaaagctattgctaa

SEQ ID NO: 3147 - protein, 460 aa, Mus musculus
MPLRLLLLLLWLWGLQWAETDSEGQTTTGELYQRWEHYGQECQKMLETTEPPSGLACNGSFDMYACWNYTAANTTARVSCPWYLPWFRQVSAGFVFRQCGSDGQWGSWRDHTQCENPEKNGAFQDQTLILERLQIMYTVGYSLSLTTLLLALLILSLFRRLHCTRNYIHMNLFTSFMLRAAAILTRDQLLPPLGPYTGDQAPTPWNQALAACRTAQIMTQYCVGANYTWLLVEGVYLHHLLVIVGRSEKGHFRCYLLLGWGAPALFVIPWVIVRYLRENTQCWERNEVKAIWWIIRTPILITILINFLIFIRILGILVSKLRTRQMRCPDYRLRLARSTLTLVPLLGVHEVVFAPVTEEQVEGSLRFAKLAFEIFLSSFQGFLVSVLYCFINKEVQSEIRQGWRHRRLRLSLQEQRPRPHQELAPRAVPLSSACREAAVGNALPSGMLHVPGDEVLESYC

SEQ ID NO: 3148 - DNA, 1383 bp, Mus musculus
  source 1..1383: mol_type = other DNA
atgccgctgcgcctgctgctgctgctgctgtggctgtggggcctgcagtgggcggaaaccgatagcgaaggccagaccaccaccggcgaactgtatcagcgctgggaacattatggccaggaatgccagaaaatgctggaaaccaccgaaccgccgagcggcctggcgtgcaacggcagctttgatatgtatgcgtgctggaactataccgcggcgaacaccaccgcgcgcgtgagctgcccgtggtatctgccgtggtttcgccaggtgagcgcgggctttgtgtttcgccagtgcggcagcgatggccagtggggcagctggcgcgatcatacccagtgcgaaaacccggaaaaaaacggcgcgtttcaggatcagaccctgattctggaacgcctgcagattatgtataccgtgggctatagcctgagcctgaccaccctgctgctggcgctgctgattctgagcctgtttcgccgcctgcattgcacccgcaactatattcatatgaacctgtttaccagctttatgctgcgcgcggcggcgattctgacccgcgatcagctgctgccgccgctgggcccgtataccggcgatcaggcgccgaccccgtggaaccaggcgctggcggcgtgccgcaccgcgcagattatgacccagtattgcgtgggcgcgaactatacctggctgctggtggaaggcgtgtatctgcatcatctgctggtgattgtgggccgcagcgaaaaaggccattttcgctgctatctgctgctgggctggggcgcgccggcgctgtttgtgattccgtgggtgattgtgcgctatctgcgcgaaaacacccagtgctgggaacgcaacgaagtgaaagcgatttggtggattattcgcaccccgattctgattaccattctgattaactttctgatttttattcgcattctgggcattctggtgagcaaactgcgcacccgccagatgcgctgcccggattatcgcctgcgcctggcgcgcagcaccctgaccctggtgccgctgctgggcgtgcatgaagtggtgtttgcgccggtgaccgaagaacaggtggaaggcagcctgcgctttgcgaaactggcgtttgaaatttttctgagcagctttcagggctttctggtgagcgtgctgtattgctttattaacaaagaagtgcagagcgaaattcgccagggctggcgccatcgccgcctgcgcctgagcctgcaggaacagcgcccgcgcccgcatcaggaactggcgccgcgcgcggtgccgctgagcagcgcgtgccgcgaagcggcggtgggcaacgcgctgccgagcggcatgctgcatgtgccgggcgatgaagtgctggaaagctattgctaa

SEQ ID NO: 3149 - protein, 230 aa, Mus musculus
MPLRLLLLLLWLWGLQWAETDSEGQTTTGELYQRWEHYGQECQKMLETTEPPSGLACNGSFDMYACWNYTAANTTARVSCPWYLPWFRQVSAGFVFRQCGSDGQWGSWRDHTQCENPEKNGAFQDQTLILERLQIMYTVGYSLSLTTLLLALLILSLFRRLHCTRNYIHMNLFTSFMLRAAAILTRDQLLPPLGPYTGDQAPTPWNQVLHRLLPGGTKTFPIYFRTFPHH

SEQ ID NO: 3150 - DNA, 693 bp, Mus musculus
  source 1..693: mol_type = other DNA
atgccgctgcgcctgctgctgctgctgctgtggctgtggggcctgcagtgggcggaaaccgatagcgaaggccagaccaccaccggcgaactgtatcagcgctgggaacattatggccaggaatgccagaaaatgctggaaaccaccgaaccgccgagcggcctggcgtgcaacggcagctttgatatgtatgcgtgctggaactataccgcggcgaacaccaccgcgcgcgtgagctgcccgtggtatctgccgtggtttcgccaggtgagcgcgggctttgtgtttcgccagtgcggcagcgatggccagtggggcagctggcgcgatcatacccagtgcgaaaacccggaaaaaaacggcgcgtttcaggatcagaccctgattctggaacgcctgcagattatgtataccgtgggctatagcctgagcctgaccaccctgctgctggcgctgctgattctgagcctgtttcgccgcctgcattgcacccgcaactatattcatatgaacctgtttaccagctttatgctgcgcgcggcggcgattctgacccgcgatcagctgctgccgccgctgggcccgtataccggcgatcaggcgccgaccccgtggaaccaggtgctgcatcgcctgctgccgggcggcaccaaaacctttccgatttattttcgcacctttccgcatcattaa

SEQ ID NO: 3151 - protein, 42 aa, Homo sapiens
YAEGTFISDYSIAMDKIRQQDFVNWLLAQKGKKNDWKHNLTQ

SEQ ID NO: 3152 - DNA, 126 bp, Homo sapiens
  source 1..126: mol_type = other DNA
tatgcggaaggcacctttattagcgattatagcattgcgatggataaaattcgccagcaggattttgtgaactggctgctggcgcagaaaggcaaaaaaaacgattggaaacataacctgacccag

SEQ ID NO: 3153 - protein, 41 aa, Mus musculus
YAEGTFISDYSIAMDKIRQQDFVNWLLAQRGKKSDWKHNIT

SEQ ID NO: 3154 - DNA, 126 bp, Mus musculus
  source 1..126: mol_type = other DNA
tatgcggaaggcacctttattagcgattatagcattgcgatggataaaattcgccagcaggattttgtgaactggctgctggcgcagcgcggcaaaaaaagcgattggaaacataacattacccag

SEQ ID NO: 3155 - protein, 42 aa, Rattus rattus; identical to SEQ ID NO: 3151

SEQ ID NO: 3156 - DNA, 126 bp, Rattus rattus; identical to SEQ ID NO: 3152
  source 1..126: mol_type = other DNA

SEQ ID NO: 3157 - protein, 22 aa, synthetic construct
MDMRVPAQLLGLLLLWLRGARC

SEQ ID NO: 3158 - DNA, 66 bp, synthetic construct
  source 1..66: mol_type = other DNA
atggacatgagagtgcctgcacagctgctgggcctgctgctgctgtggctgagaggcgccagatgc

SEQ ID NO: 3159 - protein, 19 aa, synthetic construct
MAWALLLLTLLTQGTGSWA

SEQ ID NO: 3160 - DNA, 57 bp, synthetic construct
  source 1..57: mol_type = other DNA
atggcctgggctctgctgctcctcaccctcctcactcagggcacagggtcctgggcc

SEQ ID NO: 3161 - protein, 4 aa, synthetic construct
GGGG

SEQ ID NO: 3162 - skipped

SEQ ID NO: 3163 - protein, 39 aa, synthetic construct
HGEGTFTSDLSKQMEEEAVRLFIEWLKNGGPSSGAPPPS

SEQ ID NO: 3164 - protein, 39 aa, synthetic construct
HSDGTFTSDLSKQMEEEAVRLFIEWLKNGGPSSGAPPPS

SEQ ID NO: 3165 - protein, 39 aa, synthetic construct
HGEGTFTSDLSKQLEEEAVRLFIEWLKNGGPSSGAPPPS

SEQ ID NO: 3166 - protein, 39 aa, synthetic construct
HGEGTFTSDLSKQLEEEAVRLFIEFLKNGGPSSGAPPPS

SEQ ID NO: 3167 - protein, 39 aa, synthetic construct
HGEGTFTSDLSKQLEEEAARLFIEFLKNGGPSSGAPPPS

SEQ ID NO: 3168 - protein, 30 aa, synthetic construct
HGEGTFTSDLSKQMEEEAVRLFIEWLKNGG

SEQ ID NO: 3169 - protein, 30 aa, synthetic construct
HGEGTFTSDLSKQLEEEAVRLFIEWLKNGG

SEQ ID NO: 3170 - protein, 30 aa, synthetic construct
HGEGTFTSDLSKQLEEEAVRLFIEFLKNGG

SEQ ID NO: 3171 - protein, 30 aa, synthetic construct
HGEGTFTSDLSKQLEEEAARLFIEFLKNGG

SEQ ID NO: 3172 - protein, 28 aa, synthetic construct
HGEGTFTSDLSKQMEEEAVRLFIEWLKN

SEQ ID NO: 3173 - protein, 28 aa, synthetic construct
HGEGTFTSDLSKQLEEEAVRLFIEWLKN

SEQ ID NO: 3174 - protein, 28 aa, synthetic construct
HGEGTFTSDLSKQLEEEAVRLFIEFLKN

SEQ ID NO: 3175 - protein, 28 aa, synthetic construct
HGEGTFTSDLSKQLEEEAARLFIEFLKN

SEQ ID NO: 3176 - protein, 39 aa, synthetic construct
HGEGTFTSDLSKQLEEKAAKEFIEFLKQGGPSSGAPPPS

SEQ ID NO: 3177 - protein, 39 aa, synthetic construct
HGEGTFTSDLSKQLEEKAAKEFIEWLKQGGPSSGAPPPS

SEQ ID NO: 3178 - protein, 39 aa, synthetic construct
  MOD_RES 14: note = octylG
HGEGTFTSDLSKQGEEEAVRLFIEWLKQGGPSSGAPPPS

SEQ ID NO: 3179 - protein, 39 aa, synthetic construct
  MOD_RES 34: note = octylG
HGEGTFTSDLSKQLEEEAVRLFIEWLKQGGPSSGAPPPS

SEQ ID NO: 3180 - protein, 37 aa, synthetic construct
HGEFTFTSDLSKQLEEEAVRLFIEWLKQGGPSKEIIS

SEQ ID NO: 3181 - protein, 39 aa, synthetic construct
HGEFTFTSDLSKQLEEKAAKEFIEWLKQGGPSSGAPPPS

SEQ ID NO: 3182 - protein, 39 aa, synthetic construct
HGEGTFTSDLVKILEAEAVRKFIEFLKNGGPSSGAPPPS

SEQ ID NO: 3183 - protein, 40 aa, synthetic construct
HGEGTFTSDLSKQMEEEAVRLFIEWLKNGGPSSGAPPPSK

SEQ ID NO: 3184 - protein, 31 aa, synthetic construct
HAEGTFTSDVSSYLEGQAAKEFIAWLVKGRG

SEQ ID NO: 3185 - protein, 30 aa, synthetic construct
HAEGTFTSDVSSYLEGQAAKEFIAWLVKGR

SEQ ID NO: 3186 - protein, 30 aa, synthetic construct
  VARIANT 2: note = Aib
  VARIANT 29: note = Aib
HXEGTFTSDVSSYLEGQAAREFIAFLVRXR

SEQ ID NO: 3187 - protein, 31 aa, synthetic construct
  VARIANT 2: note = Xaa is A, V, or G
  VARIANT 16: note = Xaa is G, K or E
  VARIANT 17: note = Xaa is Q or K
  VARIANT 24: note = Xaa is A or E
  VARIANT 27: note = Xaa is V or K
  VARIANT 28: note = Xaa is K, N, or R
  VARIANT 30: note = Xaa is R or G
  VARIANT 31: note = Xaa is G, H, P, or Absent
HXEGTFTSDVSSYLEXXAAKEFIXWLXXGXX

SEQ ID NO: 3188 - protein, 31 aa, synthetic construct
HAEGTFTSDVSSYLEGQAAKEFIAWLVRGRG

SEQ ID NO: 3189 - protein, 31 aa, synthetic construct
HAEGTFTSDVSSYLEGQAAKEFIEWLVKGRG

SEQ ID NO: 3190 - protein, 31 aa, synthetic construct
HAEGTFTSDVSSYLEKQAAKEFIAWLVKGRG

SEQ ID NO: 3191 - protein, 31 aa, synthetic construct
HGEGTFTSDVSSYLEEQAAKEFIAWLVKGGG

SEQ ID NO: 3192 - protein, 31 aa, synthetic construct
HVEGTFTSDVSSYLEEQAAKEFIAWLVKGGG

SEQ ID NO: 3193 - protein, 31 aa, synthetic construct
HGEGTFTSDVSSYLEEQAAKEFIAWLKNGGG

SEQ ID NO: 3194 - protein, 31 aa, synthetic construct
HVEGTFTSDVSSYLEEQAAKEFIAWLKNGGG

SEQ ID NO: 3195 - protein, 31 aa, synthetic construct
HGEGTFTSDVSSYLEEQAAKEFIAWLVKGGP

SEQ ID NO: 3196 - protein, 31 aa, synthetic construct
HVEGTFTSDVSSYLEEQAAKEFIAWLVKGGP

SEQ ID NO: 3197 - protein, 31 aa, synthetic construct
HGEGTFTSDVSSYLEEQAAKEFIAWLKNGGP

SEQ ID NO: 3198 - protein, 31 aa, synthetic construct
HVEGTFTSDVSSYLEEQAAKEFIAWLKNGGP

SEQ ID NO: 3199 - protein, 30 aa, synthetic construct
HGEGTFTSDVSSYLEEQAAKEFIAWLVKGG

SEQ ID NO: 3200 - protein, 30 aa, synthetic construct
HVEGTFTSDVSSYLEEQAAKEFIAWLVKGG

SEQ ID NO: 3201 - protein, 30 aa, synthetic construct
HVEGTFTSDVSSYLEEQAAKEFIAWLVNGG

SEQ ID NO: 3202 - protein, 30 aa, synthetic construct
HGEGTFTSDVSSYLEEQAAKEFIAWLVNGG

SEQ ID NO: 3203 - protein, 230 aa, synthetic construct
  VARIANT 16: note = Xaa is P or E
  VARIANT 17: note = Xaa is F, V, or A
  VARIANT 18: note = Xaa is L, E or A
  VARIANT 80: note = Xaa is N or A
  VARIANT 230: note = Xaa is K or absent
AESKYGPPCPPCPAPXXXGGPSVFLFPPKPKDTLMISRTPEVTCVVVDVSQEDPEVQFNWYVDGVEVHNAKTKPREEQFXSTYRVVSVLTVLHQDWLNGKEYKCKVSNKGLPSSIEKTISKAKGQPREPQVYTLPPSQEEMTKNQVSLTCLVKGFYPSDIAVEWESNGQPENNYKTTPPVLDSDGSFFLYSRLTVDKSRWQEGNVFSCSVMHEALHNHYTQKSLSLSLGX

SEQ ID NO: 3204 - protein, 5 aa, synthetic construct
GGGGS

SEQ ID NO: 3205 - protein, 275 aa, synthetic construct
HGEGTFTSDVSSYLEEQAAKEFIAWLVKGGGGGGGSGGGGSGGGGSAESKYGPPCPPCPAPEAAGGPSVFLFPPKPKDTLMISRTPEVTCVVVDVSQEDPEVQFNWYVDGVEVHNAKTKPREEQFNSTYRVVSVLTVLHQDWLNGKEYKCKVSNKGLPSSIEKTISKAKGQPREPQVYTLPPSQEEMTKNQVSLTCLVKGFYPSDIAVEWESNGQPENNYKTTPPVLDSDGSFFLYSRLTVDKSRWQEGNVFSCSVMHEALHNHYTQKSLSLSLG

SEQ ID NO: 3206 - protein, 40 aa, synthetic construct
  VARIANT 2: note = D-Ala, G, V, L, I, S, or T
  VARIANT 16: note = Xaa is V or I
  VARIANT 27: note = Xaa is V or I
  VARIANT 40
HXEGTFTSDVSSYLEXQAAKEFIAWLXKGGPSSGAPPPCC

SEQ ID NO: 3207 - protein, 40 aa, synthetic construct
  MOD_RES 40: note = NH2
HVEGTFTSDVSSYLEEQAAKEFIAWLIKGGPSSGAPPPCC

SEQ ID NO: 3208 - protein, 39 aa, synthetic construct
HGEGTFTSDLSKQMEEEAVKLFIEWLKNGGPSSGAPPPS

SEQ ID NO: 3209 - protein, 39 aa, synthetic construct
HGEGTFTSDLSKQMEEEAVRLFIEWLKNGGPKSGAPPPS

SEQ ID NO: 3210 - protein, 38 aa, synthetic construct
GEGTFTSDLSKQMEEEAVKLFIEWLKNGGPSSGAPPPS

SEQ ID NO: 3211 - protein, 39 aa, synthetic construct
  MOD_RES 14: note = Nle
HGEGTFTSDLSRQXEEEAVRLFIEWLRNGGPKSGAPPPS

SEQ ID NO: 3212 - protein, 39 aa, synthetic construct; identical to SEQ ID NO: 3208

SEQ ID NO: 3213 - protein, 39 aa, synthetic construct; identical to SEQ ID NO: 3208

SEQ ID NO: 3214 - protein, 39 aa, synthetic construct; identical to SEQ ID NO: 3208

SEQ ID NO: 3215 - protein, 39 aa, synthetic construct; identical to SEQ ID NO: 3208

SEQ ID NO: 3216 - protein, 40 aa, synthetic construct; identical to SEQ ID NO: 3183

SEQ ID NO: 3217 - protein, 40 aa, synthetic construct; identical to SEQ ID NO: 3183

SEQ ID NO: 3218 - protein, 40 aa, synthetic construct; identical to SEQ ID NO: 3183

SEQ ID NO: 3219 - protein, 40 aa, synthetic construct; identical to SEQ ID NO: 3183

SEQ ID NO: 3220 - protein, 40 aa, synthetic construct; identical to SEQ ID NO: 3183

SEQ ID NO: 3221 - protein, 40 aa, synthetic construct; identical to SEQ ID NO: 3183

SEQ ID NO: 3222 - protein, 30 aa, synthetic construct
AEGTFTSDVSSYLEGQAAREFIAWLVKGRG

SEQ ID NO: 3223 - protein, 30 aa, synthetic construct; identical to SEQ ID NO: 3222

SEQ ID NO: 3224 - protein, 32 aa, synthetic construct
HAEGTFTSDVSSYLEGQAAREFIAWLVRGRGK

SEQ ID NO: 3225 - protein, 32 aa, synthetic construct; identical to SEQ ID NO: 3224

SEQ ID NO: 3226 - protein, 31 aa, synthetic construct
  MOD_RES 2: note = Aib
HXEGTFTSDVSSYLEGQAAKEFIAWLVKGRK

SEQ ID NO: 3227 - protein, 31 aa, synthetic construct
  MOD_RES 2: note = Xaa is Aib
HXEGTFTSDVSSYLEGQAAKEFIAWLVKGKG

SEQ ID NO: 3228 - protein, 30 aa, synthetic construct
  MOD_RES 2: note = Xaa is Aib
  MOD_RES 16: note = Xaa is Aib
HXEGTFTSDVSSYLEXQAAKEFIAWLVKGK

SEQ ID NO: 3229 - protein, 30 aa, synthetic construct
  MOD_RES 2: note = Aib
  MOD_RES 16: note = Aib
  VARIANT 26: note = Xaa is BLeu
HXEGTFTSDVSSYLEXQAAKEFIAWXVKGK

SEQ ID NO: 3230 - protein, 31 aa, synthetic construct
  MOD_RES 2: note = Xaa is Aib
  MOD_RES 16: note = Xaa is Aib
HXEGTFTSDVSSYLEXQAAKEFIAWLVKGRK

SEQ ID NO: 3231 - protein, 32 aa, synthetic construct
  VARIANT 2: note = Xaa is Aib
  VARIANT 16: note = Xaa is Aib
  VARIANT 26: note = Xaa is BLeu
HXEGTFTSDVSSYLEXQAAKEFIAWXUVKGRK

SEQ ID NO: 3232 - protein, 31 aa, synthetic construct
  VARIANT 2: note = Xaa is Aib
  VARIANT 16: note = Xaa is Aib
  VARIANT 26: note = Xaa is aMeLeu
HXEGTFTSDVSSYLEXQAAKEFIAWXVKGRK

SEQ ID NO: 3233 - protein, 31 aa, synthetic construct
  MOD_RES 2: note = Aib
  MOD_RES 5: note = AMEF
  MOD_RES 15: note = Aib
HXEGTXTSDVSSYLEXQAAKEFIAWLVKGRK

SEQ ID NO: 3234 - protein, 31 aa, synthetic construct
  VARIANT 2: note = Xaa is Aib
  VARIANT 10: note = Xaa is BLeu
  VARIANT 16: note = Xaa is Aib
HXEGTFTSDXSSYLEXQAAKEFIAWLVKGRK

SEQ ID NO: 3235 - protein, 31 aa, synthetic construct
  VARIANT 2: note = Xaa is Aib
  VARIANT 16: note = Xaa is Aib
HXEGTFTSDVSSYLEXQAAKEFIAWLVKGGK

SEQ ID NO: 3236 - protein, 31 aa, synthetic construct
  VARIANT 2: note = Xaa is Aib
  VARIANT 16: note = Xaa is Aib
HXEGTFTSDVSSYLEXQAAKEFIAWLKNGGK

SEQ ID NO: 3237 - protein, 31 aa, synthetic construct
  VARIANT 2: note = Xaa is Aib
  VARIANT 16: note = Xaa is Aib
  VARIANT 31: note = Xaa is 2-(2-amino)ethoxy)]acetic acid
HXEGTFTSDVSSYLEXQAAKEFIAWLKNGGX

SEQ ID NO: 3238 - protein, 31 aa, synthetic construct
  VARIANT 2: note = Xaa is Aib
  VARIANT 16: note = Xaa is Aib
HXEGTFTSDVSSYLEXQAAKEFIAWLVKGGG

SEQ ID NO: 3239 - protein, 31 aa, synthetic construct
  VARIANT 16: note = Xaa is Aib
HXEGTFTSDVSSYLEGEAAKKFIAWLVKGGG

SEQ ID NO: 3240 - protein, 32 aa, synthetic construct
  VARIANT 2: note = Xaa is Aib
HXEGTFTSDVSSYLEEQAAKEKFIAWLVKGGK

SEQ ID NO: 3241 - protein, 39 aa, synthetic construct
  VARIANT 2: note = Xaa is Aib
  VARIANT 16: note = Xaa is Aib
HXEGTFTSDVSSYLEXEAVRLFIEWLKNGGPSSGAPPPS

SEQ ID NO: 3242 - protein, 31 aa, synthetic construct; identical to SEQ ID NO: 3191

SEQ ID NO: 3243 - protein, 31 aa, synthetic construct
  VARIANT 2: note = Xaa is Aib
HXEGTFTSDVSSYLEEQAAKEFIAWLVKGGG

SEQ ID NO: 3244 - protein, 31 aa, synthetic construct
  VARIANT 2: note = Xaa is Aib
HXEGTFTSDYSSYLEEQAAKEFIAWLVKGGG

SEQ ID NO: 3245 - protein, 31 aa, synthetic construct
  VARIANT 2: note = Xaa is Aib
HXEGTFTSDVSKYLEEEAVRLFIEWLKNGGG

SEQ ID NO: 3246 - protein, 31 aa, synthetic construct
  VARIANT 2: note = Xaa is Aib
HXEGTFTSDVSKYLEEEAAKLFIEWLKNGGG

SEQ ID NO: 3247 - protein, 31 aa, synthetic construct
  VARIANT 2: note = Xaa is Aib
HXEGTFTSDVSKYLEEEAAKLFIEWLVKGGG

SEQ ID NO: 3248 - protein, 30 aa, synthetic construct
  VARIANT 2: note = Xaa is Aib
  VARIANT 16: note = Xaa is Aib
HXIGTFTSDVSSYLEXQAAKEFIAWLVKGG

SEQ ID NO: 3249 - protein, 30 aa, synthetic construct
  VARIANT 2: note = Xaa is Aib
  VARIANT 16: note = Xaa is Aib
HXEGTFTSEVSSYLEXQAAKEFIAWLVKGG

SEQ ID NO: 3250 - skipped

SEQ ID NO: 3251 - protein, 5 aa, synthetic construct
GGGGG

SEQ ID NO: 3252 - protein, 7 aa, synthetic construct
GGGGGGG

SEQ ID NO: 3253 - protein, 15 aa, synthetic construct
GGGGSGGGGSGGGGS

SEQ ID NO: 3254 - protein, 6 aa, synthetic construct
GGGGGK

SEQ ID NO: 3255 - protein, 7 aa, synthetic construct
GGGGGKR

SEQ ID NO: 3256 - protein, 8 aa, synthetic construct
GGGKGGGG

SEQ ID NO: 3257 - protein, 8 aa, synthetic construct
GGGNGSGG

SEQ ID NO: 3258 - protein, 8 aa, synthetic construct
GGGCGGGG

SEQ ID NO: 3259 - protein, 5 aa, synthetic construct
GPNGG

SEQ ID NO: 3260 - protein, 8 aa, synthetic construct
GGGKGGGG

SEQ ID NO: 3261 - protein, 5 aa, synthetic construct
GGGGS

SEQ ID NO: 3262 - protein, 10 aa, synthetic construct
GGGGSGGGGS

SEQ ID NO: 3263 - protein, 20 aa, synthetic construct
GGGGSGGGGSGGGGSGGGGS

SEQ ID NO: 3264 - protein, 25 aa, synthetic construct
GGGGSGGGGSGGGGSGGGGSGGGGS

SEQ ID NO: 3265 - protein, 6 aa, synthetic construct
GGEGGG

SEQ ID NO: 3266 - protein, 8 aa, synthetic construct
GGEEEGGG

SEQ ID NO: 3267 - protein, 5 aa, synthetic construct
GEEEG

SEQ ID NO: 3268 - protein, 4 aa, synthetic construct
GEEE

SEQ ID NO: 3269 - protein, 6 aa, synthetic construct
GGDGGG

SEQ ID NO: 3270 - protein, 7 aa, synthetic construct
GGDDDGG

SEQ ID NO: 3271 - protein, 5 aa, synthetic construct
GDDDG

SEQ ID NO: 3272 - protein, 4 aa, synthetic construct
GDDD

SEQ ID NO: 3273 - protein, 21 aa, synthetic construct
GGGGSDDSDEGSDGEDGGGGS

SEQ ID NO: 3274 - protein, 5 aa, synthetic construct
WEWEW

SEQ ID NO: 3275 - protein, 5 aa, synthetic construct
FEFEF

SEQ ID NO: 3276 - protein, 6 aa, synthetic construct
EEEWWW

SEQ ID NO: 3277 - protein, 6 aa, synthetic construct
EEEFFF

SEQ ID NO: 3278 - protein, 7 aa, synthetic construct
WWEEEWW

SEQ ID NO: 3279 - protein, 7 aa, synthetic construct
FFEEEFF

SEQ ID NO: 3280-3282 - skipped (3 entries)

SEQ ID NO: 3283 - protein, 22 aa, synthetic construct
GSGSATGGSGSTASSGSGSATH

SEQ ID NO: 3284 - protein, 22 aa, synthetic construct
HGSGSATGGSGSTASSGSGSAT

SEQ ID NO: 3285 - protein, 19 aa, synthetic construct
AEAAAKEAAAKEAAAKAGG

SEQ ID NO: 3286 - protein, 32 aa, synthetic construct
  VARIANT 1: note = H2
  VARIANT 2: note = Xaa is Aib
  VARIANT 30: note = Xaa is 2-(2-amino)ethoxy)]acetic acid
  VARIANT 31: note = Xaa is 2-(2-amino)ethoxy)]acetic acid
HXEGTFTSDVSSYLEQAAKEFIAWLKNGGXXK

SEQ ID NO: 3287 - protein, 31 aa, synthetic construct; identical to SEQ ID NO: 3238
  VARIANT 1: note = H2
  VARIANT 2: note = Xaa is Aib
  VARIANT 16: note = Xaa is Aib

SEQ ID NO: 3288 - protein, 31 aa, synthetic construct; identical to SEQ ID NO: 3239
  VARIANT 1: note = H2
  VARIANT 2: note = Xaa is Aib

SEQ ID NO: 3289 - protein, 31 aa, synthetic construct
  VARIANT 1: note = H2
  VARIANT 2: note = Xaa is Aib
  VARIANT 31: note = CONH2
HXEGTFTSDVSSYLEEQAAKEFIAWLVKGGK

SEQ ID NO: 3290 - protein, 39 aa, synthetic construct; identical to SEQ ID NO: 3241
  VARIANT 1: note = H2
  VARIANT 2: note = Aib
  VARIANT 16: note = Xaa is Aib

SEQ ID NO: 3291 - protein, 31 aa, synthetic construct; identical to SEQ ID NO: 3191
  VARIANT 1: note = H2

SEQ ID NO: 3292 - protein, 31 aa, synthetic construct; identical to SEQ ID NO: 3243
  VARIANT 1: note = H2
  VARIANT 2: note = Xaa is Aib

SEQ ID NO: 3293 - protein, 31 aa, synthetic construct; identical to SEQ ID NO: 3244
  VARIANT 1: note = H2
  VARIANT 2: note = Aib

SEQ ID NO: 3294 - protein, 31 aa, synthetic construct; identical to SEQ ID NO: 3245
  VARIANT 1: note = H2
  VARIANT 2: note = Xaa is Aib

SEQ ID NO: 3295 - protein, 31 aa, synthetic construct; identical to SEQ ID NO: 3246
  VARIANT 1: note = H2
  VARIANT 2: note = Xaa is Aib

SEQ ID NO: 3296 - protein, 31 aa, synthetic construct; identical to SEQ ID NO: 3247
  VARIANT 1: note = H2
  VARIANT 2: note = Xaa is Aib

SEQ ID NO: 3297 - protein, 30 aa, synthetic construct; identical to SEQ ID NO: 3248
  VARIANT 1: note = H2
  VARIANT 2: note = Xaa is Aib
  VARIANT 16: note = Xaa is Aib

SEQ ID NO: 3298 - protein, 30 aa, synthetic construct; identical to SEQ ID NO: 3249
  VARIANT 1: note = H2
  VARIANT 2: note = Xaa is Aib
  VARIANT 16: note = Xaa is Aib

SEQ ID NO: 3299 - protein, 30 aa, synthetic construct
  VARIANT 1: note = H2
  VARIANT 2: note = Xaa is Aib
  VARIANT 16: note = Xaa is Aib
HXAGTFTSDVSSYLEXQAAKEFIAWLVKGG

SEQ ID NO: 3300 - protein, 30 aa, synthetic construct
  VARIANT 1: note = H2; note = Xaa is Aib
  VARIANT 16: note = Xaa is Aib
  VARIANT 2: note = Xaa is Aib
HXEGTFTSDVSSYLEXQAAKEFAAWLVKGG

SEQ ID NO: 3301 - protein, 30 aa, synthetic construct
  VARIANT 1: note = H2
  VARIANT 2: note = Xaa is Aib
  VARIANT 16: note = Xaa is Aib
HXEGTFTSDVSSYLEXQAAKEFIAALVKGG

SEQ ID NO: 3302 - protein, 31 aa, synthetic construct
  VARIANT 1: note = H2
  VARIANT 2: note = Xaa is Aib
  VARIANT 16: note = Xaa is Aib
HXTGTFTSDVSSYLEXQAAKEFIAWLVKGGG

SEQ ID NO: 3303 - protein, 31 aa, synthetic construct
  VARIANT 1: note = H2
  VARIANT 2: note = Xaa is Aib
  VARIANT 16: note = Xaa is Aib
HXEGTFTSEVSSYLEXQAAKEFIAALVKGGG

SEQ ID NO: 3304 - protein, 31 aa, synthetic construct
  VARIANT 1: note = H2
  VARIANT 2: note = Xaa is Aib
  VARIANT 16: note = Xaa is Aib
HXEGTFTSDVSSYLEXQAAKEFIAALVKGGG

SEQ ID NO: 3305 - protein, 39 aa, synthetic construct
  VARIANT 1: note = H2
  VARIANT 2: note = Xaa is Aib
HXEGTFTSDVSSYLEEEAVRLFIEWLKNGGPSSGAPPPS

SEQ ID NO: 3306 - protein, 31 aa, synthetic construct
  VARIANT 1: note = H2
  VARIANT 2: note = Xaa is Aib
  VARIANT 16: note = Xaa is Aib
HXEGTFTSDYSSYLEXQAAKEFIAWLVKGGG

SEQ ID NO: 3307 - protein, 31 aa, synthetic construct; identical to SEQ ID NO: 3238
  VARIANT 1: note = H2
  VARIANT 2: note = Xaa is Aib
  VARIANT 16: note = Xaa is Aib
  VARIANT 31: note = CONH2

SEQ ID NO: 3308 - protein, 29 aa, synthetic construct
  VARIANT 1: note = Xaa is Dmia
XSQGTFTSDYSKYLDERRAKDFVQWLMNT

SEQ ID NO: 3309 - protein, 39 aa, synthetic construct; identical to SEQ ID NO: 3163
  VARIANT 1: note = H2

SEQ ID NO: 3310 - protein, 330 aa, synthetic construct
ASTKGPSVFPLAPSSKSTSGGTAALGCLVKDYFPEPVTVSWNSGALTSGVHTFPAVLQSSGLYSLSSVVTVPSSSLGTQTYICNVNHKPSNTKVDKKVEPKSCDKTHTCPPCPAPELLGGPSVFLFPPKPKDTLMISRTPEVTCVVVDVSHEDPCVKFNWYVDGVEVHNAKTKPCEEQYGSTYRCVSVLTVLHQDWLNGKEYKCKVSNKALPAPIEKTISKAKGQPREPQVYTLPPSREEMTKNQVSLTCLVKGFYPSDIAVEWESNGQPENNYKTTPPVLDSDGSFFLYSKLTVDKSRWQQGNVFSCSVMHEALHNHYTQKSLSLSPGK

SEQ ID NO: 3311 - skipped

SEQ ID NO: 3312 - protein, 7 aa, synthetic construct
PKKKRKV

SEQ ID NO: 3313 - protein, 7 aa, synthetic construct
PKKKRRV

SEQ ID NO: 3314 - protein, 16 aa, synthetic construct
KRPAATKKAGQAKKKK

SEQ ID NO: 3315 - protein, 11 aa, synthetic construct
YGRKKRRQRRR

SEQ ID NO: 3316 - protein, 9 aa, synthetic construct
RKKRRQRRR

SEQ ID NO: 3317 - protein, 9 aa, synthetic construct
PAAKRVKLD

SEQ ID NO: 3318 - protein, 11 aa, synthetic construct
RQRRNELKRSP

SEQ ID NO: 3319 - protein, 8 aa, synthetic construct
VSRKRPRP

SEQ ID NO: 3320 - protein, 8 aa, synthetic construct
PPKKARED

SEQ ID NO: 3321 - protein, 8 aa, synthetic construct
PQPKKKPL

SEQ ID NO: 3322 - protein, 12 aa, synthetic construct
SALIKKKKKMAP

SEQ ID NO: 3323 - protein, 7 aa, synthetic construct
PKQKKRK

SEQ ID NO: 3324 - protein, 10 aa, synthetic construct
RKLKKKIKKL

SEQ ID NO: 3325 - protein, 10 aa, synthetic construct
REKKKFLKRR

SEQ ID NO: 3326 - protein, 20 aa, synthetic construct
KRKGDEVDGVDEVAKKKSKK

SEQ ID NO: 3327 - protein, 17 aa, synthetic construct
RKCLQAGMNLEARKTKK

SEQ ID NO: 3328 - protein, 38 aa, synthetic construct
NQSSNFGPMKGGNFGGRSSGPYGGGGQYFAKPRNQGGY

SEQ ID NO: 3329 - protein, 42 aa, synthetic construct
RMRIZFKNKGKDTAELRRRRVEVSVELRKAKKDEQILKRRNV

SEQ ID NO: 3330 - protein, 20 aa, synthetic construct
GRKKRRQRRRPPQPKKKRKV

SEQ ID NO: 3331 - protein, 19 aa, synthetic construct
PLSSIFSRIGDPPKKKRKV

SEQ ID NO: 3332 - protein, 24 aa, synthetic construct
GALFLGWLGAAGSTMGAPKKKRKV

SEQ ID NO: 3333 - protein, 27 aa, synthetic construct
GALFLGFLGAAGSTMGAWSQPKKKRKV

SEQ ID NO: 3334 - protein, 21 aa, synthetic construct
KETWWETWWTEWSQPKKKRKV

SEQ ID NO: 3335 - protein, 11 aa, synthetic construct
YARAAARQARA

SEQ ID NO: 3336 - protein, 11 aa, synthetic construct
THRLPRRRRRR

SEQ ID NO: 3337 - protein, 11 aa, synthetic construct
GGRRARRRRRR

SEQ ID NO: 3338 - protein, 12 aa, synthetic construct
RRQRRTSKLMKR

SEQ ID NO: 3339 - protein, 27 aa, synthetic construct
GWTLNSAGYLLGKINLKALAALAKKIL

SEQ ID NO: 3340 - protein, 33 aa, synthetic construct
KALAWEAKLAKALAKALAKHLAKALAKALKCEA

SEQ ID NO: 3341 - protein, 16 aa, synthetic construct
RQIKIWFQNRRMKWKK

SEQ ID NO: 3342 - RNA, 20 nt, synthetic construct
  source 1..20: mol_type = other RNA
tagacgtgaacttgcgcagg

SEQ ID NO: 3343 - RNA, 20 nt, synthetic construct
  source 1..20: mol_type = other RNA
gcaagttcacgtctatccgt

SEQ ID NO: 3344 - DNA, 20 bp, synthetic construct
  source 1..20: mol_type = other DNA
gctgcccttagctgatttgg

SEQ ID NO: 3345 - DNA, 20 bp, synthetic construct
  source 1..20: mol_type = other DNA
gtgtggctgaatctggaagc

SEQ ID NO: 3346 - DNA, 24 bp, synthetic construct
  source 1..24: mol_type = other DNA
gatagagacaacaatagggtcggc

SEQ ID NO: 3347 - DNA, 18 bp, synthetic construct
  source 1..18: mol_type = other DNA
ggctcccagcaccatgaa

SEQ ID NO: 3348 - DNA, 24 bp, synthetic construct
  source 1..24: mol_type = other DNA
cttcctctactggactctgatcca

SEQ ID NO: 3349 - DNA, 20 bp, synthetic construct
  source 1..20: mol_type = other DNA
gccaccgatccacacagagt

SEQ ID NO: 3350 - protein, 8 aa, synthetic construct
GGGSGGGS

SEQ ID NO: 3351 - protein, 16 aa, synthetic construct
GGGGSGGGGSGGGGSK

SEQ ID NO: 3352 - protein, 12 aa, synthetic construct
GGGSGGGSGGGS

SEQ ID NO: 3353 - protein, 16 aa, synthetic construct
GGGSGGGSGGGSGGGS

SEQ ID NO: 3354 - protein, 20 aa, synthetic construct
GGGSGGGSGGGSGGGSGGGS

SEQ ID NO: 3355 - protein, 30 aa, synthetic construct
GGGGSGGGGSGGGGSGGGGSGGGGSGGGGS

SEQ ID NO: 3356 - protein, 28 aa, synthetic construct
GGGSGGGSGGGSGGGSGGGSGGGSGGGS

1. A method for producing an antibody peptide conjugate, the method comprising:
a) expressing the antibody in a mammalian cell wherein the mammalian cell is a cathepsin D knock out cell, and wherein the antibody comprises a cysteine or non-canonical amino acid amino acid substitution at one or more conjugation site(s);
b) purifying the antibody; and
c) conjugating a peptide to the antibody at the conjugation site(s).

2. The method according to claim 1, wherein both alleles of cathepsin D of the mammalian cell are knocked out.

3. The method according to claim 2, wherein the mammalian cell is a CHO cell.

4. The method according to claim 1, wherein the antibody is an anti-GIPR antibody.

5. The method according to claim 1, wherein the peptide is a GLP-1 agonist.

6. The method according to claim 2, wherein the alleles of cathepsin D are knocked out using CRISPR or using zinc-finger technology.

7. The method according to claim 1, wherein the antibody is a monoclonal antibody, a recombinant antibody, a human antibody, a humanized antibody, or a chimeric antibody.

8. The method according to claim 7, wherein the antibody is a human antibody.

9. The method according to claim 7, wherein the antibody is a monoclonal antibody.

10. The method according to claim 8, wherein the antibody is a human antibody and wherein the antibody is of the IgG1-, IgG2-IgG3- or IgG4-type.

11. The method according to claim 10, wherein the antibody is of the IgG1- or the IgG2-type.

12. The method according to claim 4, wherein the antibody inhibits binding of GIP to the extracellular portion of human GIPR.

13. The method according to claim 4, wherein the CH1-hinge-CH2-CH3 domain of the antibody heavy chain comprises SEQ ID NO: 3310.

14. The method according to claim 4, wherein the antibody comprises a CDRL1, a CDRL2, a CDRL3, a CDRH1, a CDRH2, and a CDRH3, wherein the CDRL1 comprises a sequence selected from the group consisting of SEQ ID NOs: 629-785; the CDRL2 comprises a sequence selected from the group consisting of SEQ ID NOs: 786-942; the CDRL3 comprises a sequence selected from the group consisting of SEQ ID NOs: 943-1099; the CDRH1 comprises a sequence selected from the group consisting of SEQ ID NOs: 1100-1256; the CDRH2 comprises a sequence selected from the group consisting of SEQ ID NOs: 1257-1413; and the CDRH3 comprises a sequence selected from the group consisting of SEQ ID NOs: 1414-1570, wherein
the antibody or functional fragment thereof comprises a cysteine or non-canonical amino acid amino acid substitution at one or more conjugation site(s) selected from the group consisting of
D70 of the antibody light chain relative to reference sequence SEQ ID NO: 455,
E276 of the antibody heavy chain relative to reference sequence SEQ ID NO: 612, and
T363 of the antibody heavy chain relative to reference sequence SEQ ID NO: 612.

15. The method according to any claim 4, wherein the antibody comprises a CDRL1, a CDRL2, a CDRL3, a CDRH1, a CDRH2, and a CDRH3, wherein each CDRL1, CDRL2, CDRL3, CDRH1, CDRH2, and CDRH3, respectively, comprises a sequence selected from the group consisting of SEQ ID NO: 629, SEQ ID NO: 786, SEQ ID NO: 943, SEQ ID NO: 1100, SEQ ID NO: 1257, and SEQ ID NO: 1414; SEQ ID NO: 630, SEQ ID NO: 787, SEQ ID NO: 944, SEQ ID NO: 1101, SEQ ID NO: 1258, and SEQ ID NO: 1415; SEQ ID NO: 631, SEQ ID NO: 788, SEQ ID NO: 945, SEQ ID NO: 1102, SEQ ID NO: 1259, and SEQ ID NO: 1416; SEQ ID NO: 632, SEQ ID NO: 789, SEQ ID NO: 946, SEQ ID NO: 1103, SEQ ID NO: 1260, and SEQ ID NO: 1417; SEQ ID NO: 633, SEQ ID NO: 790, SEQ ID NO: 947, SEQ ID NO: 1104, SEQ ID NO: 1261, and SEQ ID NO: 1418; SEQ ID NO: 634, SEQ ID NO: 791, SEQ ID NO: 948, SEQ ID NO: 1105, SEQ ID NO: 1262, and SEQ ID NO: 1419; SEQ ID NO: 635, SEQ ID NO: 792, SEQ ID NO: 949, SEQ ID NO: 1106, SEQ ID NO: 1263, and SEQ ID NO: 1420; SEQ ID NO: 636, SEQ ID NO: 793, SEQ ID NO: 950, SEQ ID NO: 1107, SEQ ID NO: 1264, and SEQ ID NO: 1421; SEQ ID NO: 637, SEQ ID NO: 794, SEQ ID NO: 951, SEQ ID NO: 1108, SEQ ID NO: 1265, and SEQ ID NO: 1422; SEQ ID NO: 638, SEQ ID NO: 795, SEQ ID NO: 952, SEQ ID NO: 1109, SEQ ID NO: 1266, and SEQ ID NO: 1423; SEQ ID NO: 639, SEQ ID NO: 796, SEQ ID NO: 953, SEQ ID NO: 1110, SEQ ID NO: 1267, and SEQ ID NO: 1424; SEQ ID NO: 640, SEQ ID NO: 797, SEQ ID NO: 954, SEQ ID NO: 1111, SEQ ID NO: 1268, and SEQ ID NO: 1425; SEQ ID NO: 641, SEQ ID NO: 798, SEQ ID NO: 955, SEQ ID NO: 1112, SEQ ID NO: 1269, and SEQ ID NO: 1426; SEQ ID NO: 642, SEQ ID NO: 799, SEQ ID NO: 956, SEQ ID NO: 1113, SEQ ID NO: 1270, and SEQ ID NO: 1427; SEQ ID NO: 643, SEQ ID NO: 800, SEQ ID NO: 957, SEQ ID NO: 1114, SEQ ID NO: 1271, and SEQ ID NO: 1428; SEQ ID NO: 644, SEQ ID NO: 801, SEQ ID NO: 958, SEQ ID NO: 1115, SEQ ID NO: 1272, and SEQ ID NO: 1429; SEQ ID NO: 645, SEQ ID NO: 802, SEQ ID NO: 959, SEQ ID NO: 1116, SEQ ID NO: 1273, and SEQ ID NO: 1430; SEQ ID NO: 646, SEQ ID NO: 803, SEQ ID NO: 960, SEQ ID NO: 1117, SEQ ID NO: 1274, and SEQ ID NO: 1431; SEQ ID NO: 647, SEQ ID NO: 804, SEQ ID NO: 961, SEQ ID NO: 1118, SEQ ID NO: 1275, and SEQ ID NO: 1432; SEQ ID NO: 648, SEQ ID NO: 805, SEQ ID NO: 962, SEQ ID NO: 1119, SEQ ID NO: 1276, and SEQ ID NO: 1433; SEQ ID NO: 649, SEQ ID NO: 806, SEQ ID NO: 963, SEQ ID NO: 1120, SEQ ID NO: 1277, and SEQ ID NO: 1434; SEQ ID NO: 650, SEQ ID NO: 807, SEQ ID NO: 964, SEQ ID NO: 1121, SEQ ID NO: 1278, and SEQ ID NO: 1435; SEQ ID NO: 651, SEQ ID NO: 808, SEQ ID NO: 965, SEQ ID NO: 1122, SEQ ID NO: 1279, and SEQ ID NO: 1436; SEQ ID NO: 652, SEQ ID NO: 809, SEQ ID NO: 966, SEQ ID NO: 1123, SEQ ID NO: 1280, and SEQ ID NO: 1437; SEQ ID NO: 653, SEQ ID NO: 810, SEQ ID NO: 967, SEQ ID NO: 1124, SEQ ID NO: 1281, and SEQ ID NO: 1438; SEQ ID NO: 654, SEQ ID NO: 811, SEQ ID NO: 968, SEQ ID NO: 1125, SEQ ID NO: 1282, and SEQ ID NO: 1439; SEQ ID NO: 655, SEQ ID NO: 812, SEQ ID NO: 969, SEQ ID NO: 1126, SEQ ID NO: 1283, and SEQ ID NO: 1440; SEQ ID NO: 656, SEQ ID NO: 813, SEQ ID NO: 970, SEQ ID NO: 1127, SEQ ID NO: 1284, and SEQ ID NO: 1441; SEQ ID NO: 657, SEQ ID NO: 814, SEQ ID NO: 971, SEQ ID NO: 1128, SEQ ID NO: 1285, and SEQ ID NO: 1442; SEQ ID NO: 658, SEQ ID NO: 815, SEQ ID NO: 972, SEQ ID NO: 1129, SEQ ID NO: 1286, and SEQ ID NO: 1443; SEQ ID NO: 659, SEQ ID NO: 816, SEQ ID NO: 973, SEQ ID NO: 1130, SEQ ID NO: 1287, and SEQ ID NO: 1444; SEQ ID NO: 660, SEQ ID NO: 817, SEQ ID NO: 974, SEQ ID NO: 1131, SEQ ID NO: 1288, and SEQ ID NO: 1445; SEQ ID NO: 661, SEQ ID NO: 818, SEQ ID NO: 975, SEQ ID NO: 1132, SEQ ID NO: 1289, and SEQ ID NO: 1446; SEQ ID NO: 662, SEQ ID NO: 819, SEQ ID NO: 976, SEQ ID NO: 1133, SEQ ID NO: 1290, and SEQ ID NO: 1447; SEQ ID NO: 663, SEQ ID NO: 820, SEQ ID NO: 977, SEQ ID NO: 1134, SEQ ID NO: 1291, and SEQ ID NO: 1448; SEQ ID NO: 664, SEQ ID NO: 821, SEQ ID NO: 978, SEQ ID NO: 1135, SEQ ID NO: 1292, and SEQ ID NO: 1449; SEQ ID NO: 665, SEQ ID NO: 822, SEQ ID NO: 979, SEQ ID NO: 1136, SEQ ID NO: 1293, and SEQ ID NO: 1450; SEQ ID NO: 666, SEQ ID NO: 823, SEQ ID NO: 980, SEQ ID NO: 1137, SEQ ID NO: 1294, and SEQ ID NO: 1451; SEQ ID NO: 667, SEQ ID NO: 824, SEQ ID NO: 981, SEQ ID NO: 1138, SEQ ID NO: 1295, and SEQ ID NO: 1452; SEQ ID NO: 668, SEQ ID NO: 825, SEQ ID NO: 982, SEQ ID NO: 1139, SEQ ID NO: 1296, and SEQ ID NO: 1453; SEQ ID NO: 669, SEQ ID NO: 826, SEQ ID NO: 983, SEQ ID NO: 1140, SEQ ID NO: 1297, and SEQ ID NO: 1454; SEQ ID NO: 670, SEQ ID NO: 827, SEQ ID NO: 984, SEQ ID NO: 1141, SEQ ID NO: 1298, and SEQ ID NO: 1455; SEQ ID NO: 671, SEQ ID NO: 828, SEQ ID NO: 985, SEQ ID NO: 1142, SEQ ID NO: 1299, and SEQ ID NO: 1456; SEQ ID NO: 672, SEQ ID NO: 829, SEQ ID NO: 986, SEQ ID NO: 1143, SEQ ID NO: 1300, and SEQ ID NO: 1457; SEQ ID NO: 673, SEQ ID NO: 830, SEQ ID NO: 987, SEQ ID NO: 1144, SEQ ID NO: 1301, and SEQ ID NO: 1458; SEQ ID NO: 674, SEQ ID NO: 831, SEQ ID NO: 988, SEQ ID NO: 1145, SEQ ID NO: 1302, and SEQ ID NO: 1459; SEQ ID NO: 675, SEQ ID NO: 832, SEQ ID NO: 989, SEQ ID NO: 1146, SEQ ID NO: 1303, and SEQ ID NO: 1460; SEQ ID NO: 676, SEQ ID NO: 833, SEQ ID NO: 990, SEQ ID NO: 1147, SEQ ID NO: 1304, and SEQ ID NO: 1461; SEQ ID NO: 677, SEQ ID NO: 834, SEQ ID NO: 991, SEQ ID NO: 1148, SEQ ID NO: 1305, and SEQ ID NO: 1462; SEQ ID NO: 678, SEQ ID NO: 835, SEQ ID NO: 992, SEQ ID NO: 1149, SEQ ID NO: 1306, and SEQ ID NO: 1463; SEQ ID NO: 679, SEQ ID NO: 836, SEQ ID NO: 993, SEQ ID NO: 1150, SEQ ID NO: 1307, and SEQ ID NO: 1464; SEQ ID NO: 680, SEQ ID NO: 837, SEQ ID NO: 994, SEQ ID NO: 1151, SEQ ID NO: 1308, and SEQ ID NO: 1465; SEQ ID NO: 681, SEQ ID NO: 838, SEQ ID NO: 995, SEQ ID NO: 1152, SEQ ID NO: 1309, and SEQ ID NO: 1466; SEQ ID NO: 682, SEQ ID NO: 839, SEQ ID NO: 996, SEQ ID NO: 1153, SEQ ID NO: 1310, and SEQ ID NO: 1467; SEQ ID NO: 683, SEQ ID NO: 840, SEQ ID NO: 997, SEQ ID NO: 1154, SEQ ID NO: 1311, and SEQ ID NO: 1468; SEQ ID NO: 684, SEQ ID NO: 841, SEQ ID NO: 998, SEQ ID NO: 1155, SEQ ID NO: 1312, and SEQ ID NO: 1469; SEQ ID NO: 685, SEQ ID NO: 842, SEQ ID NO: 999, SEQ ID NO: 1156, SEQ ID NO: 1313, and SEQ ID NO: 1470; SEQ ID NO: 686, SEQ ID NO: 843, SEQ ID NO: 1000, SEQ ID NO: 1157, SEQ ID NO: 1314, and SEQ ID NO: 1471; SEQ ID NO: 687, SEQ ID NO: 844, SEQ ID NO: 1001, SEQ ID NO: 1158, SEQ ID NO: 1315, and SEQ ID NO: 1472; SEQ ID NO: 688, SEQ ID NO: 845, SEQ ID NO: 1002, SEQ ID NO: 1159, SEQ ID NO: 1316, and SEQ ID NO: 1473; SEQ ID NO: 689, SEQ ID NO: 846, SEQ ID NO: 1003, SEQ ID NO: 1160, SEQ ID NO: 1317, and SEQ ID NO: 1474; SEQ ID NO: 690, SEQ ID NO: 847, SEQ ID NO: 1004, SEQ ID NO: 1161, SEQ ID NO: 1318, and SEQ ID NO: 1475; SEQ ID NO: 691, SEQ ID NO: 848, SEQ ID NO: 1005, SEQ ID NO: 1162, SEQ ID NO: 1319, and SEQ ID NO: 1476; SEQ ID NO: 692, SEQ ID NO: 849, SEQ ID NO: 1006, SEQ ID NO: 1163, SEQ ID NO: 1320, and SEQ ID NO: 1477; SEQ ID NO: 693, SEQ ID NO: 850, SEQ ID NO: 1007, SEQ ID NO: 1164, SEQ ID NO: 1321, and SEQ ID NO: 1478; SEQ ID NO: 694, SEQ ID NO: 851, SEQ ID NO: 1008, SEQ ID NO: 1165, SEQ ID NO: 1322, and SEQ ID NO: 1479; SEQ ID NO: 695, SEQ ID NO: 852, SEQ ID NO: 1009, SEQ ID NO: 1166, SEQ ID NO: 1323, and SEQ ID NO: 1480; SEQ ID NO: 696, SEQ ID NO: 853, SEQ ID NO: 1010, SEQ ID NO: 1167, SEQ ID NO: 1324, and SEQ ID NO: 1481; SEQ ID NO: 697, SEQ ID NO: 854, SEQ ID NO: 1011, SEQ ID NO: 1168, SEQ ID NO: 1325, and SEQ ID NO: 1482; SEQ ID NO: 698, SEQ ID NO: 855, SEQ ID NO: 1012, SEQ ID NO: 1169, SEQ ID NO: 1326, and SEQ ID NO: 1483; SEQ ID NO: 699, SEQ ID NO: 856, SEQ ID NO: 1013, SEQ ID NO: 1170, SEQ ID NO: 1327, and SEQ ID NO: 1484; SEQ ID NO: 700, SEQ ID NO: 857, SEQ ID NO: 1014, SEQ ID NO: 1171, SEQ ID NO: 1328, and SEQ ID NO: 1485; SEQ ID NO: 701, SEQ ID NO: 858, SEQ ID NO: 1015, SEQ ID NO: 1172, SEQ ID NO: 1329, and SEQ ID NO: 1486; SEQ ID NO: 702, SEQ ID NO: 859, SEQ ID NO: 1016, SEQ ID NO: 1173, SEQ ID NO: 1330, and SEQ ID NO: 1487; SEQ ID NO: 703, SEQ ID NO: 860, SEQ ID NO: 1017, SEQ ID NO: 1174, SEQ ID NO: 1331, and SEQ ID NO: 1488; SEQ ID NO: 704, SEQ ID NO: 861, SEQ ID NO: 1018, SEQ ID NO: 1175, SEQ ID NO: 1332, and SEQ ID NO: 1489; SEQ ID NO: 705, SEQ ID NO: 862, SEQ ID NO: 1019, SEQ ID NO: 1176, SEQ ID NO: 1333, and SEQ ID NO: 1490; SEQ ID NO: 706, SEQ ID NO: 863, SEQ ID NO: 1020, SEQ ID NO: 1177, SEQ ID NO: 1334, and SEQ ID NO: 1491; SEQ ID NO: 707, SEQ ID NO: 864, SEQ ID NO: 1021, SEQ ID NO: 1178, SEQ ID NO: 1335, and SEQ ID NO: 1492; SEQ ID NO: 708, SEQ ID NO: 865, SEQ ID NO: 1022, SEQ ID NO: 1179, SEQ ID NO: 1336, and SEQ ID NO: 1493; SEQ ID NO: 709, SEQ ID NO: 866, SEQ ID NO: 1023, SEQ ID NO: 1180, SEQ ID NO: 1337, and SEQ ID NO: 1494; SEQ ID NO: 710, SEQ ID NO: 867, SEQ ID NO: 1024, SEQ ID NO: 1181, SEQ ID NO: 1338, and SEQ ID NO: 1495; SEQ ID NO: 711, SEQ ID NO: 868, SEQ ID NO: 1025, SEQ ID NO: 1182, SEQ ID NO: 1339, and SEQ ID NO: 1496; SEQ ID NO: 712, SEQ ID NO: 869, SEQ ID NO: 1026, SEQ ID NO: 1183, SEQ ID NO: 1340, and SEQ ID NO: 1497; SEQ ID NO: 713, SEQ ID NO: 870, SEQ ID NO: 1027, SEQ ID NO: 1184, SEQ ID NO: 1341, and SEQ ID NO: 1498; SEQ ID NO: 714, SEQ ID NO: 871, SEQ ID NO: 1028, SEQ ID NO: 1185, SEQ ID NO: 1342, and SEQ ID NO: 1499; SEQ ID NO: 715, SEQ ID NO: 872, SEQ ID NO: 1029, SEQ ID NO: 1186, SEQ ID NO: 1343, and SEQ ID NO: 1500; SEQ ID NO: 716, SEQ ID NO: 873, SEQ ID NO: 1030, SEQ ID NO: 1187, SEQ ID NO: 1344, and SEQ ID NO: 1501; SEQ ID NO: 717, SEQ ID NO: 874, SEQ ID NO: 1031, SEQ ID NO: 1188, SEQ ID NO: 1345, and SEQ ID NO: 1502; SEQ ID NO: 718, SEQ ID NO: 875, SEQ ID NO: 1032, SEQ ID NO: 1189, SEQ ID NO: 1346, and SEQ ID NO: 1503; SEQ ID NO: 719, SEQ ID NO: 876, SEQ ID NO: 1033, SEQ ID NO: 1190, SEQ ID NO: 1347, and SEQ ID NO: 1504; SEQ ID NO: 720, SEQ ID NO: 877, SEQ ID NO: 1034, SEQ ID NO: 1191, SEQ ID NO: 1348, and SEQ ID NO: 1505; SEQ ID NO: 721, SEQ ID NO: 878, SEQ ID NO: 1035, SEQ ID NO: 1192, SEQ ID NO: 1349, and SEQ ID NO: 1506; SEQ ID NO: 722, SEQ ID NO: 879, SEQ ID NO: 1036, SEQ ID NO: 1193, SEQ ID NO: 1350, and SEQ ID NO: 1507; SEQ ID NO: 723, SEQ ID NO: 880, SEQ ID NO: 1037, SEQ ID NO: 1194, SEQ ID NO: 1351, and SEQ ID NO: 1508; SEQ ID NO: 724, SEQ ID NO: 881, SEQ ID NO: 1038, SEQ ID NO: 1195, SEQ ID NO: 1352, and SEQ ID NO: 1509; SEQ ID NO: 725, SEQ ID NO: 882, SEQ ID NO: 1039, SEQ ID NO: 1196, SEQ ID NO: 1353, and SEQ ID NO: 1510; SEQ ID NO: 726, SEQ ID NO: 883, SEQ ID NO: 1040, SEQ ID NO: 1197, SEQ ID NO: 1354, and SEQ ID NO: 1511; SEQ ID NO: 727, SEQ ID NO: 884, SEQ ID NO: 1041, SEQ ID NO: 1198, SEQ ID NO: 1355, and SEQ ID NO: 1512; SEQ ID NO: 728, SEQ ID NO: 885, SEQ ID NO: 1042, SEQ ID NO: 1199, SEQ ID NO: 1356, and SEQ ID NO: 1513; SEQ ID NO: 729, SEQ ID NO: 886, SEQ ID NO: 1043, SEQ ID NO: 1200, SEQ ID NO: 1357, and SEQ ID NO: 1514; SEQ ID NO: 730, SEQ ID NO: 887, SEQ ID NO: 1044, SEQ ID NO: 1201, SEQ ID NO: 1358, and SEQ ID NO: 1515; SEQ ID NO: 731, SEQ ID NO: 888, SEQ ID NO: 1045, SEQ ID NO: 1202, SEQ ID NO: 1359, and SEQ ID NO: 1516; SEQ ID NO: 732, SEQ ID NO: 889, SEQ ID NO: 1046, SEQ ID NO: 1203, SEQ ID NO: 1360, and SEQ ID NO: 1517; SEQ ID NO: 733, SEQ ID NO: 890, SEQ ID NO: 1047, SEQ ID NO: 1204, SEQ ID NO: 1361, and SEQ ID NO: 1518; SEQ ID NO: 734, SEQ ID NO: 891, SEQ ID NO: 1048, SEQ ID NO: 1205, SEQ ID NO: 1362, and SEQ ID NO: 1519; SEQ ID NO: 735, SEQ ID NO: 892, SEQ ID NO: 1049, SEQ ID NO: 1206, SEQ ID NO: 1363, and SEQ ID NO: 1520; SEQ ID NO: 736, SEQ ID NO: 893, SEQ ID NO: 1050, SEQ ID NO: 1207, SEQ ID NO: 1364, and SEQ ID NO: 1521; SEQ ID NO: 737, SEQ ID NO: 894, SEQ ID NO: 1051, SEQ ID NO: 1208, SEQ ID NO: 1365, and SEQ ID NO: 1522; SEQ ID NO: 738, SEQ ID NO: 895, SEQ ID NO: 1052, SEQ ID NO: 1209, SEQ ID NO: 1366, and SEQ ID NO: 1523; SEQ ID NO: 739, SEQ ID NO: 896, SEQ ID NO: 1053, SEQ ID NO: 1210, SEQ ID NO: 1367, and SEQ ID NO: 1524; SEQ ID NO: 740, SEQ ID NO: 897, SEQ ID NO: 1054, SEQ ID NO: 1211, SEQ ID NO: 1368, and SEQ ID NO: 1525; SEQ ID NO: 741, SEQ ID NO: 898, SEQ ID NO: 1055, SEQ ID NO: 1212, SEQ ID NO: 1369, and SEQ ID NO: 1526; SEQ ID NO: 742, SEQ ID NO: 899, SEQ ID NO: 1056, SEQ ID NO: 1213, SEQ ID NO: 1370, and SEQ ID NO: 1527; SEQ ID NO: 743, SEQ ID NO: 900, SEQ ID NO: 1057, SEQ ID NO: 1214, SEQ ID NO: 1371, and SEQ ID NO: 1528; SEQ ID NO: 744, SEQ ID NO: 901, SEQ ID NO: 1058, SEQ ID NO: 1215, SEQ ID NO: 1372, and SEQ ID NO: 1529; SEQ ID NO: 745, SEQ ID NO: 902, SEQ ID NO: 1059, SEQ ID NO: 1216, SEQ ID NO: 1373, and SEQ ID NO: 1530; SEQ ID NO: 746, SEQ ID NO: 903, SEQ ID NO: 1060, SEQ ID NO: 1217, SEQ ID NO: 1374, and SEQ ID NO: 1531; SEQ ID NO: 747, SEQ ID NO: 904, SEQ ID NO: 1061, SEQ ID NO: 1218, SEQ ID NO: 1375, and SEQ ID NO: 1532; SEQ ID NO: 748, SEQ ID NO: 905, SEQ ID NO: 1062, SEQ ID NO: 1219, SEQ ID NO: 1376, and SEQ ID NO: 1533; SEQ ID NO: 749, SEQ ID NO: 906, SEQ ID NO: 1063, SEQ ID NO: 1220, SEQ ID NO: 1377, and SEQ ID NO: 1534; SEQ ID NO: 750, SEQ ID NO: 907, SEQ ID NO: 1064, SEQ ID NO: 1221, SEQ ID NO: 1378, and SEQ ID NO: 1535; SEQ ID NO: 751, SEQ ID NO: 908, SEQ ID NO: 1065, SEQ ID NO: 1222, SEQ ID NO: 1379, and SEQ ID NO: 1536; SEQ ID NO: 752, SEQ ID NO: 909, SEQ ID NO: 1066, SEQ ID NO: 1223, SEQ ID NO: 1380, and SEQ ID NO: 1537; SEQ ID NO: 753, SEQ ID NO: 910, SEQ ID NO: 1067, SEQ ID NO: 1224, SEQ ID NO: 1381, and SEQ ID NO: 1538; SEQ ID NO: 754, SEQ ID NO: 911, SEQ ID NO: 1068, SEQ ID NO: 1225, SEQ ID NO: 1382, and SEQ ID NO: 1539; SEQ ID NO: 755, SEQ ID NO: 912, SEQ ID NO: 1069, SEQ ID NO: 1226, SEQ ID NO: 1383, and SEQ ID NO: 1540; SEQ ID NO: 756, SEQ ID NO: 913, SEQ ID NO: 1070, SEQ ID NO: 1227, SEQ ID NO: 1384, and SEQ ID NO: 1541; SEQ ID NO: 757, SEQ ID NO: 914, SEQ ID NO: 1071, SEQ ID NO: 1228, SEQ ID NO: 1385, and SEQ ID NO: 1542; SEQ ID NO: 758, SEQ ID NO: 915, SEQ ID NO: 1072, SEQ ID NO: 1229, SEQ ID NO: 1386, and SEQ ID NO: 1543; SEQ ID NO: 759, SEQ ID NO: 916, SEQ ID NO: 1073, SEQ ID NO: 1230, SEQ ID NO: 1387, and SEQ ID NO: 1544; SEQ ID NO: 760, SEQ ID NO: 917, SEQ ID NO: 1074, SEQ ID NO: 1231, SEQ ID NO: 1388, and SEQ ID NO: 1545; SEQ ID NO: 761, SEQ ID NO: 918, SEQ ID NO: 1075, SEQ ID NO: 1232, SEQ ID NO: 1389, and SEQ ID NO: 1546; SEQ ID NO: 762, SEQ ID NO: 919, SEQ ID NO: 1076, SEQ ID NO: 1233, SEQ ID NO: 1390, and SEQ ID NO: 1547; SEQ ID NO: 763, SEQ ID NO: 920, SEQ ID NO: 1077, SEQ ID NO: 1234, SEQ ID NO: 1391, and SEQ ID NO: 1548; SEQ ID NO: 764, SEQ ID NO: 921, SEQ ID NO: 1078, SEQ ID NO: 1235, SEQ ID NO: 1392, and SEQ ID NO: 1549; SEQ ID NO: 765, SEQ ID NO: 922, SEQ ID NO: 1079, SEQ ID NO: 1236, SEQ ID NO: 1393, and SEQ ID NO: 1550; SEQ ID NO: 766, SEQ ID NO: 923, SEQ ID NO: 1080, SEQ ID NO: 1237, SEQ ID NO: 1394, and SEQ ID NO: 1551; SEQ ID NO: 767, SEQ ID NO: 924, SEQ ID NO: 1081, SEQ ID NO: 1238, SEQ ID NO: 1395, and SEQ ID NO: 1552; SEQ ID NO: 768, SEQ ID NO: 925, SEQ ID NO: 1082, SEQ ID NO: 1239, SEQ ID NO: 1396, and SEQ ID NO: 1553; SEQ ID NO: 769, SEQ ID NO: 926, SEQ ID NO: 1083, SEQ ID NO: 1240, SEQ ID NO: 1397, and SEQ ID NO: 1554; SEQ ID NO: 770, SEQ ID NO: 927, SEQ ID NO: 1084, SEQ ID NO: 1241, SEQ ID NO: 1398, and SEQ ID NO: 1555; SEQ ID NO: 771, SEQ ID NO: 928, SEQ ID NO: 1085, SEQ ID NO: 1242, SEQ ID NO: 1399, and SEQ ID NO: 1556; SEQ ID NO: 772, SEQ ID NO: 929, SEQ ID NO: 1086, SEQ ID NO: 1243, SEQ ID NO: 1400, and SEQ ID NO: 1557; SEQ ID NO: 773, SEQ ID NO: 930, SEQ ID NO: 1087, SEQ ID NO: 1244, SEQ ID NO: 1401, and SEQ ID NO: 1558; SEQ ID NO: 774, SEQ ID NO: 931, SEQ ID NO: 1088, SEQ ID NO: 1245, SEQ ID NO: 1402, and SEQ ID NO: 1559; SEQ ID NO: 775, SEQ ID NO: 932, SEQ ID NO: 1089, SEQ ID NO: 1246, SEQ ID NO: 1403, and SEQ ID NO: 1560; SEQ ID NO: 776, SEQ ID NO: 933, SEQ ID NO: 1090, SEQ ID NO: 1247, SEQ ID NO: 1404, and SEQ ID NO: 1561; SEQ ID NO: 777, SEQ ID NO: 934, SEQ ID NO: 1091, SEQ ID NO: 1248, SEQ ID NO: 1405, and SEQ ID NO: 1562; SEQ ID NO: 778, SEQ ID NO: 935, SEQ ID NO: 1092, SEQ ID NO: 1249, SEQ ID NO: 1406, and SEQ ID NO: 1563; SEQ ID NO: 779, SEQ ID NO: 936, SEQ ID NO: 1093, SEQ ID NO: 1250, SEQ ID NO: 1407, and SEQ ID NO: 1564; SEQ ID NO: 780, SEQ ID NO: 937, SEQ ID NO: 1094, SEQ ID NO: 1251, SEQ ID NO: 1408, and SEQ ID NO: 1565; SEQ ID NO: 781, SEQ ID NO: 938, SEQ ID NO: 1095, SEQ ID NO: 1252, SEQ ID NO: 1409, and SEQ ID NO: 1566; SEQ ID NO: 782, SEQ ID NO: 939, SEQ ID NO: 1096, SEQ ID NO: 1253, SEQ ID NO: 1410, and SEQ ID NO: 1567; SEQ ID NO: 783, SEQ ID NO: 940, SEQ ID NO: 1097, SEQ ID NO: 1254, SEQ ID NO: 1411, and SEQ ID NO: 1568; SEQ ID NO: 784, SEQ ID NO: 941, SEQ ID NO: 1098, SEQ ID NO: 1255, SEQ ID NO: 1412, and SEQ ID NO: 1569; and SEQ ID NO: 785, SEQ ID NO: 942, SEQ ID NO: 1099, SEQ ID NO: 1256, SEQ ID NO: 1413, and SEQ ID NO: 1570, wherein
the antibody or functional fragment thereof comprises a cysteine or non-canonical amino acid amino acid substitution at one or more conjugation site(s) selected from the group consisting of
D70 of the antibody light chain relative to reference sequence SEQ ID NO: 455,
E276 of the antibody heavy chain relative to reference sequence SEQ ID NO: 612, and
T363 of the antibody heavy chain relative to reference sequence SEQ ID NO: 612.

16. The method according to claim 4, wherein the antibody comprises a light chain variable region comprising a sequence selected from the group consisting of SEQ ID NOs: 1-157 and a heavy chain variable region comprising a sequence selected from the group consisting of SEQ ID NOs: 158-314, wherein
the antibody or functional fragment thereof comprises a cysteine or non-canonical amino acid amino acid substitution at one or more conjugation site(s) selected from the group consisting of
D70 of the antibody light chain relative to reference sequence SEQ ID NO: 455,
E276 of the antibody heavy chain relative to reference sequence SEQ ID NO: 612, and
T363 of the antibody heavy chain relative to reference sequence SEQ ID NO: 612.

17. The method according to claim 4, wherein the antibody comprises a combination of a light chain variable region and a heavy chain variable region selected from the group consisting of a light chain variable region comprising SEQ ID NO: 1 and a heavy chain variable region comprising SEQ ID NO: 158; a light chain variable region comprising SEQ ID NO: 2 and a heavy chain variable region comprising SEQ ID NO: 159; a light chain variable region comprising SEQ ID NO: 3 and a heavy chain variable region comprising SEQ ID NO: 160; a light chain variable region comprising SEQ ID NO: 4 and a heavy chain variable region comprising SEQ ID NO: 161; a light chain variable region comprising SEQ ID NO: 5 and a heavy chain variable region comprising SEQ ID NO: 162; a light chain variable region comprising SEQ ID NO: 6 and a heavy chain variable region comprising SEQ ID NO: 163; a light chain variable region comprising SEQ ID NO: 7 and a heavy chain variable region comprising SEQ ID NO: 164; a light chain variable region comprising SEQ ID NO: 8 and a heavy chain variable region comprising SEQ ID NO: 165; a light chain variable region comprising SEQ ID NO: 9 and a heavy chain variable region comprising SEQ ID NO: 166; a light chain variable region comprising SEQ ID NO: 10 and a heavy chain variable region comprising SEQ ID NO: 167; a light chain variable region comprising SEQ ID NO: 11 and a heavy chain variable region comprising SEQ ID NO: 168; a light chain variable region comprising SEQ ID NO: 12 and a heavy chain variable region comprising SEQ ID NO: 169; a light chain variable region comprising SEQ ID NO: 13 and a heavy chain variable region comprising SEQ ID NO: 170; a light chain variable region comprising SEQ ID NO: 14 and a heavy chain variable region comprising SEQ ID NO: 171; a light chain variable region comprising SEQ ID NO: 15 and a heavy chain variable region comprising SEQ ID NO: 172; a light chain variable region comprising SEQ ID NO: 16 and a heavy chain variable region comprising SEQ ID NO: 173; a light chain variable region comprising SEQ ID NO: 17 and a heavy chain variable region comprising SEQ ID NO: 174; a light chain variable region comprising SEQ ID NO: 18 and a heavy chain variable region comprising SEQ ID NO: 175; a light chain variable region comprising SEQ ID NO: 19 and a heavy chain variable region comprising SEQ ID NO: 176; a light chain variable region comprising SEQ ID NO: 20 and a heavy chain variable region comprising SEQ ID NO: 177; a light chain variable region comprising SEQ ID NO: 21 and a heavy chain variable region comprising SEQ ID NO: 178; a light chain variable region comprising SEQ ID NO: 22 and a heavy chain variable region comprising SEQ ID NO: 179; a light chain variable region comprising SEQ ID NO: 23 and a heavy chain variable region comprising SEQ ID NO: 180; a light chain variable region comprising SEQ ID NO: 24 and a heavy chain variable region comprising SEQ ID NO: 181; a light chain variable region comprising SEQ ID NO: 25 and a heavy chain variable region comprising SEQ ID NO: 182; a light chain variable region comprising SEQ ID NO: 26 and a heavy chain variable region comprising SEQ ID NO: 183; a light chain variable region comprising SEQ ID NO: 27 and a heavy chain variable region comprising SEQ ID NO: 184; a light chain variable region comprising SEQ ID NO: 28 and a heavy chain variable region comprising SEQ ID NO: 185; a light chain variable region comprising SEQ ID NO: 29 and a heavy chain variable region comprising SEQ ID NO: 186; a light chain variable region comprising SEQ ID NO: 30 and a heavy chain variable region comprising SEQ ID NO: 187; a light chain variable region comprising SEQ ID NO: 31 and a heavy chain variable region comprising SEQ ID NO: 188; a light chain variable region comprising SEQ ID NO: 32 and a heavy chain variable region comprising SEQ ID NO: 189; a light chain variable region comprising SEQ ID NO: 33 and a heavy chain variable region comprising SEQ ID NO: 190; a light chain variable region comprising SEQ ID NO: 34 and a heavy chain variable region comprising SEQ ID NO: 191; a light chain variable region comprising SEQ ID NO: 35 and a heavy chain variable region comprising SEQ ID NO: 192; a light chain variable region comprising SEQ ID NO: 36 and a heavy chain variable region comprising SEQ ID NO: 193; a light chain variable region comprising SEQ ID NO: 37 and a heavy chain variable region comprising SEQ ID NO: 194; a light chain variable region comprising SEQ ID NO: 38 and a heavy chain variable region comprising SEQ ID NO: 195; a light chain variable region comprising SEQ ID NO: 39 and a heavy chain variable region comprising SEQ ID NO: 196; a light chain variable region comprising SEQ ID NO: 40 and a heavy chain variable region comprising SEQ ID NO: 197; a light chain variable region comprising SEQ ID NO: 41 and a heavy chain variable region comprising SEQ ID NO: 198; a light chain variable region comprising SEQ ID NO: 42 and a heavy chain variable region comprising SEQ ID NO: 199; a light chain variable region comprising SEQ ID NO: 43 and a heavy chain variable region comprising SEQ ID NO: 200; a light chain variable region comprising SEQ ID NO: 44 and a heavy chain variable region comprising SEQ ID NO: 201; a light chain variable region comprising SEQ ID NO: 45 and a heavy chain variable region comprising SEQ ID NO: 202; a light chain variable region comprising SEQ ID NO: 46 and a heavy chain variable region comprising SEQ ID NO: 203; a light chain variable region comprising SEQ ID NO: 47 and a heavy chain variable region comprising SEQ ID NO: 204; a light chain variable region comprising SEQ ID NO: 48 and a heavy chain variable region comprising SEQ ID NO: 205; a light chain variable region comprising SEQ ID NO: 49 and a heavy chain variable region comprising SEQ ID NO: 206; a light chain variable region comprising SEQ ID NO: 50 and a heavy chain variable region comprising SEQ ID NO: 207; a light chain variable region comprising SEQ ID NO: 51 and a heavy chain variable region comprising SEQ ID NO: 208; a light chain variable region comprising SEQ ID NO: 52 and a heavy chain variable region comprising SEQ ID NO: 209; a light chain variable region comprising SEQ ID NO: 53 and a heavy chain variable region comprising SEQ ID NO: 210; a light chain variable region comprising SEQ ID NO: 54 and a heavy chain variable region comprising SEQ ID NO: 211; a light chain variable region comprising SEQ ID NO: 55 and a heavy chain variable region comprising SEQ ID NO: 212; a light chain variable region comprising SEQ ID NO: 56 and a heavy chain variable region comprising SEQ ID NO: 213; a light chain variable region comprising SEQ ID NO: 57 and a heavy chain variable region comprising SEQ ID NO: 214; a light chain variable region comprising SEQ ID NO: 58 and a heavy chain variable region comprising SEQ ID NO: 215; a light chain variable region comprising SEQ ID NO: 59 and a heavy chain variable region comprising SEQ ID NO: 216; a light chain variable region comprising SEQ ID NO: 60 and a heavy chain variable region comprising SEQ ID NO: 217; a light chain variable region comprising SEQ ID NO: 61 and a heavy chain variable region comprising SEQ ID NO: 218; a light chain variable region comprising SEQ ID NO: 62 and a heavy chain variable region comprising SEQ ID NO: 219; a light chain variable region comprising SEQ ID NO: 63 and a heavy chain variable region comprising SEQ ID NO: 220; a light chain variable region comprising SEQ ID NO: 64 and a heavy chain variable region comprising SEQ ID NO: 221; a light chain variable region comprising SEQ ID NO: 65 and a heavy chain variable region comprising SEQ ID NO: 222; a light chain variable region comprising SEQ ID NO: 66 and a heavy chain variable region comprising SEQ ID NO: 223; a light chain variable region comprising SEQ ID NO: 67 and a heavy chain variable region comprising SEQ ID NO: 224; a light chain variable region comprising SEQ ID NO: 68 and a heavy chain variable region comprising SEQ ID NO: 225; a light chain variable region comprising SEQ ID NO: 69 and a heavy chain variable region comprising SEQ ID NO: 226; a light chain variable region comprising SEQ ID NO: 70 and a heavy chain variable region comprising SEQ ID NO: 227; a light chain variable region comprising SEQ ID NO: 71 and a heavy chain variable region comprising SEQ ID NO: 228; a light chain variable region comprising SEQ ID NO: 72 and a heavy chain variable region comprising SEQ ID NO: 229; a light chain variable region comprising SEQ ID NO: 73 and a heavy chain variable region comprising SEQ ID NO: 230; a light chain variable region comprising SEQ ID NO: 74 and a heavy chain variable region comprising SEQ ID NO: 231; a light chain variable region comprising SEQ ID NO: 75 and a heavy chain variable region comprising SEQ ID NO: 232; a light chain variable region comprising SEQ ID NO: 76 and a heavy chain variable region comprising SEQ ID NO: 233; a light chain variable region comprising SEQ ID NO: 77 and a heavy chain variable region comprising SEQ ID NO: 234; a light chain variable region comprising SEQ ID NO: 78 and a heavy chain variable region comprising SEQ ID NO: 235; a light chain variable region comprising SEQ ID NO: 79 and a heavy chain variable region comprising SEQ ID NO: 236; a light chain variable region comprising SEQ ID NO: 80 and a heavy chain variable region comprising SEQ ID NO: 237; a light chain variable region comprising SEQ ID NO: 81 and a heavy chain variable region comprising SEQ ID NO: 238; a light chain variable region comprising SEQ ID NO: 82 and a heavy chain variable region comprising SEQ ID NO: 239; a light chain variable region comprising SEQ ID NO: 83 and a heavy chain variable region comprising SEQ ID NO: 240; a light chain variable region comprising SEQ ID NO: 84 and a heavy chain variable region comprising SEQ ID NO: 241; a light chain variable region comprising SEQ ID NO: 85 and a heavy chain variable region comprising SEQ ID NO: 242; a light chain variable region comprising SEQ ID NO: 86 and a heavy chain variable region comprising SEQ ID NO: 243; a light chain variable region comprising SEQ ID NO: 87 and a heavy chain variable region comprising SEQ ID NO: 244; a light chain variable region comprising SEQ ID NO: 88 and a heavy chain variable region comprising SEQ ID NO: 245; a light chain variable region comprising SEQ ID NO: 89 and a heavy chain variable region comprising SEQ ID NO: 246; a light chain variable region comprising SEQ ID NO: 90 and a heavy chain variable region comprising SEQ ID NO: 247; a light chain variable region comprising SEQ ID NO: 91 and a heavy chain variable region comprising SEQ ID NO: 248; a light chain variable region comprising SEQ ID NO: 92 and a heavy chain variable region comprising SEQ ID NO: 249; a light chain variable region comprising SEQ ID NO: 93 and a heavy chain variable region comprising SEQ ID NO: 250; a light chain variable region comprising SEQ ID NO: 94 and a heavy chain variable region comprising SEQ ID NO: 251; a light chain variable region comprising SEQ ID NO: 95 and a heavy chain variable region comprising SEQ ID NO: 252; a light chain variable region comprising SEQ ID NO: 96 and a heavy chain variable region comprising SEQ ID NO: 253; a light chain variable region comprising SEQ ID NO: 97 and a heavy chain variable region comprising SEQ ID NO: 254; a light chain variable region comprising SEQ ID NO: 98 and a heavy chain variable region comprising SEQ ID NO: 255; a light chain variable region comprising SEQ ID NO: 99 and a heavy chain variable region comprising SEQ ID NO: 256; a light chain variable region comprising SEQ ID NO: 100 and a heavy chain variable region comprising SEQ ID NO: 257; a light chain variable region comprising SEQ ID NO: 101 and a heavy chain variable region comprising SEQ ID NO: 258; a light chain variable region comprising SEQ ID NO: 102 and a heavy chain variable region comprising SEQ ID NO: 259; a light chain variable region comprising SEQ ID NO: 103 and a heavy chain variable region comprising SEQ ID NO: 260; a light chain variable region comprising SEQ ID NO: 104 and a heavy chain variable region comprising SEQ ID NO: 261; a light chain variable region comprising SEQ ID NO: 105 and a heavy chain variable region comprising SEQ ID NO: 262; a light chain variable region comprising SEQ ID NO: 106 and a heavy chain variable region comprising SEQ ID NO: 263; a light chain variable region comprising SEQ ID NO: 107 and a heavy chain variable region comprising SEQ ID NO: 264; a light chain variable region comprising SEQ ID NO: 108 and a heavy chain variable region comprising SEQ ID NO: 265; a light chain variable region comprising SEQ ID NO: 109 and a heavy chain variable region comprising SEQ ID NO: 266; a light chain variable region comprising SEQ ID NO: 110 and a heavy chain variable region comprising SEQ ID NO: 267; a light chain variable region comprising SEQ ID NO: 111 and a heavy chain variable region comprising SEQ ID NO: 268; a light chain variable region comprising SEQ ID NO: 112 and a heavy chain variable region comprising SEQ ID NO: 269; a light chain variable region comprising SEQ ID NO: 113 and a heavy chain variable region comprising SEQ ID NO: 270; a light chain variable region comprising SEQ ID NO: 114 and a heavy chain variable region comprising SEQ ID NO: 271; a light chain variable region comprising SEQ ID NO: 115 and a heavy chain variable region comprising SEQ ID NO: 272; a light chain variable region comprising SEQ ID NO: 116 and a heavy chain variable region comprising SEQ ID NO: 273; a light chain variable region comprising SEQ ID NO: 117 and a heavy chain variable region comprising SEQ ID NO: 274; a light chain variable region comprising SEQ ID NO: 118 and a heavy chain variable region comprising SEQ ID NO: 275; a light chain variable region comprising SEQ ID NO: 119 and a heavy chain variable region comprising SEQ ID NO: 276; a light chain variable region comprising SEQ ID NO: 120 and a heavy chain variable region comprising SEQ ID NO: 277; a light chain variable region comprising SEQ ID NO: 121 and a heavy chain variable region comprising SEQ ID NO: 278; a light chain variable region comprising SEQ ID NO: 122 and a heavy chain variable region comprising SEQ ID NO: 279; a light chain variable region comprising SEQ ID NO: 123 and a heavy chain variable region comprising SEQ ID NO: 280; a light chain variable region comprising SEQ ID NO: 124 and a heavy chain variable region comprising SEQ ID NO: 281; a light chain variable region comprising SEQ ID NO: 125 and a heavy chain variable region comprising SEQ ID NO: 282; a light chain variable region comprising SEQ ID NO: 126 and a heavy chain variable region comprising SEQ ID NO: 283; a light chain variable region comprising SEQ ID NO: 127 and a heavy chain variable region comprising SEQ ID NO: 284; a light chain variable region comprising SEQ ID NO: 128 and a heavy chain variable region comprising SEQ ID NO: 285; a light chain variable region comprising SEQ ID NO: 129 and a heavy chain variable region comprising SEQ ID NO: 286; a light chain variable region comprising SEQ ID NO: 130 and a heavy chain variable region comprising SEQ ID NO: 287; a light chain variable region comprising SEQ ID NO: 131 and a heavy chain variable region comprising SEQ ID NO: 288; a light chain variable region comprising SEQ ID NO: 132 and a heavy chain variable region comprising SEQ ID NO: 289; a light chain variable region comprising SEQ ID NO: 133 and a heavy chain variable region comprising SEQ ID NO: 290; a light chain variable region comprising SEQ ID NO: 134 and a heavy chain variable region comprising SEQ ID NO: 291; a light chain variable region comprising SEQ ID NO: 135 and a heavy chain variable region comprising SEQ ID NO: 292; a light chain variable region comprising SEQ ID NO: 136 and a heavy chain variable region comprising SEQ ID NO: 293; a light chain variable region comprising SEQ ID NO: 137 and a heavy chain variable region comprising SEQ ID NO: 294; a light chain variable region comprising SEQ ID NO: 138 and a heavy chain variable region comprising SEQ ID NO: 295; a light chain variable region comprising SEQ ID NO: 139 and a heavy chain variable region comprising SEQ ID NO: 296; a light chain variable region comprising SEQ ID NO: 140 and a heavy chain variable region comprising SEQ ID NO: 297; a light chain variable region comprising SEQ ID NO: 141 and a heavy chain variable region comprising SEQ ID NO: 298; a light chain variable region comprising SEQ ID NO: 142 and a heavy chain variable region comprising SEQ ID NO: 299; a light chain variable region comprising SEQ ID NO: 143 and a heavy chain variable region comprising SEQ ID NO: 300; a light chain variable region comprising SEQ ID NO: 144 and a heavy chain variable region comprising SEQ ID NO: 301; a light chain variable region comprising SEQ ID NO: 145 and a heavy chain variable region comprising SEQ ID NO: 302; a light chain variable region comprising SEQ ID NO: 146 and a heavy chain variable region comprising SEQ ID NO: 303; a light chain variable region comprising SEQ ID NO: 147 and a heavy chain variable region comprising SEQ ID NO: 304; a light chain variable region comprising SEQ ID NO: 148 and a heavy chain variable region comprising SEQ ID NO: 305; a light chain variable region comprising SEQ ID NO: 149 and a heavy chain variable region comprising SEQ ID NO: 306; a light chain variable region comprising SEQ ID NO: 150 and a heavy chain variable region comprising SEQ ID NO: 307; a light chain variable region comprising SEQ ID NO: 151 and a heavy chain variable region comprising SEQ ID NO: 308; a light chain variable region comprising SEQ ID NO: 152 and a heavy chain variable region comprising SEQ ID NO: 309; a light chain variable region comprising SEQ ID NO: 153 and a heavy chain variable region comprising SEQ ID NO: 310; a light chain variable region comprising SEQ ID NO: 154 and a heavy chain variable region comprising SEQ ID NO: 311; a light chain variable region comprising SEQ ID NO: 155 and a heavy chain variable region comprising SEQ ID NO: 312; a light chain variable region comprising SEQ ID NO: 156 and a heavy chain variable region comprising SEQ ID NO: 313; and a light chain variable region comprising SEQ ID NO: 157 and a heavy chain variable region comprising SEQ ID NO: 314, wherein
the antibody or functional fragment thereof comprises a cysteine or non-canonical amino acid amino acid substitution at one or more conjugation site(s) selected from the group consisting of
D70 of the antibody light chain relative to reference sequence SEQ ID NO: 455,
E276 of the antibody heavy chain relative to reference sequence SEQ ID NO: 612, and
T363 of the antibody heavy chain relative to reference sequence SEQ ID NO: 612.

18. The method according to claim 4, wherein the antibody comprises a light chain comprising a sequence selected from the group consisting of SEQ ID NOs: 315-471 and a heavy chain comprising a sequence selected from the group consisting of SEQ ID NOs: 472-628, wherein
the antibody or functional fragment thereof comprises a cysteine or non-canonical amino acid amino acid substitution at one or more conjugation site(s) selected from the group consisting of
D70 of the antibody light chain relative to reference sequence SEQ ID NO: 455,
E276 of the antibody heavy chain relative to reference sequence SEQ ID NO: 612, and
T363 of the antibody heavy chain relative to reference sequence SEQ ID NO: 612.

19. The method according to claim 4, wherein the antibody comprises a combination of a light chain and a heavy chain selected from the group consisting of a light chain comprising SEQ ID NO: 315 and a heavy chain comprising SEQ ID NO: 472; a light chain comprising SEQ ID NO: 316 and a heavy chain comprising SEQ ID NO: 473; a light chain comprising SEQ ID NO: 317 and a heavy chain comprising SEQ ID NO: 474; a light chain comprising SEQ ID NO: 318 and a heavy chain comprising SEQ ID NO: 475; a light chain comprising SEQ ID NO: 319 and a heavy chain comprising SEQ ID NO: 476; a light chain comprising SEQ ID NO: 320 and a heavy chain comprising SEQ ID NO: 477; a light chain comprising SEQ ID NO: 321 and a heavy chain comprising SEQ ID NO: 478; a light chain comprising SEQ ID NO: 322 and a heavy chain comprising SEQ ID NO: 479; a light chain comprising SEQ ID NO: 323 and a heavy chain comprising SEQ ID NO: 480; a light chain comprising SEQ ID NO: 324 and a heavy chain comprising SEQ ID NO: 481; a light chain comprising SEQ ID NO: 325 and a heavy chain comprising SEQ ID NO: 482; a light chain comprising SEQ ID NO: 326 and a heavy chain comprising SEQ ID NO: 483; a light chain comprising SEQ ID NO: 327 and a heavy chain comprising SEQ ID NO: 484; a light chain comprising SEQ ID NO: 328 and a heavy chain comprising SEQ ID NO: 485; a light chain comprising SEQ ID NO: 329 and a heavy chain comprising SEQ ID NO: 486; a light chain comprising SEQ ID NO: 330 and a heavy chain comprising SEQ ID NO: 487; a light chain comprising SEQ ID NO: 331 and a heavy chain comprising SEQ ID NO: 488; a light chain comprising SEQ ID NO: 332 and a heavy chain comprising SEQ ID NO: 489; a light chain comprising SEQ ID NO: 333 and a heavy chain comprising SEQ ID NO: 490; a light chain comprising SEQ ID NO: 334 and a heavy chain comprising SEQ ID NO: 491; a light chain comprising SEQ ID NO: 335 and a heavy chain comprising SEQ ID NO: 492; a light chain comprising SEQ ID NO: 336 and a heavy chain comprising SEQ ID NO: 493; a light chain comprising SEQ ID NO: 337 and a heavy chain comprising SEQ ID NO: 494; a light chain comprising SEQ ID NO: 338 and a heavy chain comprising SEQ ID NO: 495; a light chain comprising SEQ ID NO: 339 and a heavy chain comprising SEQ ID NO: 496; a light chain comprising SEQ ID NO: 340 and a heavy chain comprising SEQ ID NO: 497; a light chain comprising SEQ ID NO: 341 and a heavy chain comprising SEQ ID NO: 498; a light chain comprising SEQ ID NO: 342 and a heavy chain comprising SEQ ID NO: 499; a light chain comprising SEQ ID NO: 343 and a heavy chain comprising SEQ ID NO: 500; a light chain comprising SEQ ID NO: 344 and a heavy chain comprising SEQ ID NO: 501; a light chain comprising SEQ ID NO: 345 and a heavy chain comprising SEQ ID NO: 502; a light chain comprising SEQ ID NO: 346 and a heavy chain comprising SEQ ID NO: 503; a light chain comprising SEQ ID NO: 347 and a heavy chain comprising SEQ ID NO: 504; a light chain comprising SEQ ID NO: 348 and a heavy chain comprising SEQ ID NO: 505; a light chain comprising SEQ ID NO: 349 and a heavy chain comprising SEQ ID NO: 506; a light chain comprising SEQ ID NO: 350 and a heavy chain comprising SEQ ID NO: 507; a light chain comprising SEQ ID NO: 351 and a heavy chain comprising SEQ ID NO: 508; a light chain comprising SEQ ID NO: 352 and a heavy chain comprising SEQ ID NO: 509; a light chain comprising SEQ ID NO: 353 and a heavy chain comprising SEQ ID NO: 510; a light chain comprising SEQ ID NO: 354 and a heavy chain comprising SEQ ID NO: 511; a light chain comprising SEQ ID NO: 355 and a heavy chain comprising SEQ ID NO: 512; a light chain comprising SEQ ID NO: 356 and a heavy chain comprising SEQ ID NO: 513; a light chain comprising SEQ ID NO: 357 and a heavy chain comprising SEQ ID NO: 514; a light chain comprising SEQ ID NO: 358 and a heavy chain comprising SEQ ID NO: 515; a light chain comprising SEQ ID NO: 359 and a heavy chain comprising SEQ ID NO: 516; a light chain comprising SEQ ID NO: 360 and a heavy chain comprising SEQ ID NO: 517; a light chain comprising SEQ ID NO: 361 and a heavy chain comprising SEQ ID NO: 518; a light chain comprising SEQ ID NO: 362 and a heavy chain comprising SEQ ID NO: 519; a light chain comprising SEQ ID NO: 363 and a heavy chain comprising SEQ ID NO: 520; a light chain comprising SEQ ID NO: 364 and a heavy chain comprising SEQ ID NO: 521; a light chain comprising SEQ ID NO: 365 and a heavy chain comprising SEQ ID NO: 522; a light chain comprising SEQ ID NO: 366 and a heavy chain comprising SEQ ID NO: 523; a light chain comprising SEQ ID NO: 367 and a heavy chain comprising SEQ ID NO: 524; a light chain comprising SEQ ID NO: 368 and a heavy chain comprising SEQ ID NO: 525; a light chain comprising SEQ ID NO: 369 and a heavy chain comprising SEQ ID NO: 526; a light chain comprising SEQ ID NO: 370 and a heavy chain comprising SEQ ID NO: 527; a light chain comprising SEQ ID NO: 371 and a heavy chain comprising SEQ ID NO: 528; a light chain comprising SEQ ID NO: 372 and a heavy chain comprising SEQ ID NO: 529; a light chain comprising SEQ ID NO: 373 and a heavy chain comprising SEQ ID NO: 530; a light chain comprising SEQ ID NO: 374 and a heavy chain comprising SEQ ID NO: 531; a light chain comprising SEQ ID NO: 375 and a heavy chain comprising SEQ ID NO: 532; a light chain comprising SEQ ID NO: 376 and a heavy chain comprising SEQ ID NO: 533; a light chain comprising SEQ ID NO: 377 and a heavy chain comprising SEQ ID NO: 534; a light chain comprising SEQ ID NO: 378 and a heavy chain comprising SEQ ID NO: 535; a light chain comprising SEQ ID NO: 379 and a heavy chain comprising SEQ ID NO: 536; a light chain comprising SEQ ID NO: 380 and a heavy chain comprising SEQ ID NO: 537; a light chain comprising SEQ ID NO: 381 and a heavy chain comprising SEQ ID NO: 538; a light chain comprising SEQ ID NO: 382 and a heavy chain comprising SEQ ID NO: 539; a light chain comprising SEQ ID NO: 383 and a heavy chain comprising SEQ ID NO: 540; a light chain comprising SEQ ID NO: 384 and a heavy chain comprising SEQ ID NO: 541; a light chain comprising SEQ ID NO: 385 and a heavy chain comprising SEQ ID NO: 542; a light chain comprising SEQ ID NO: 386 and a heavy chain comprising SEQ ID NO: 543; a light chain comprising SEQ ID NO: 387 and a heavy chain comprising SEQ ID NO: 544; a light chain comprising SEQ ID NO: 388 and a heavy chain comprising SEQ ID NO: 545; a light chain comprising SEQ ID NO: 389 and a heavy chain comprising SEQ ID NO: 546; a light chain comprising SEQ ID NO: 390 and a heavy chain comprising SEQ ID NO: 547; a light chain comprising SEQ ID NO: 391 and a heavy chain comprising SEQ ID NO: 548; a light chain comprising SEQ ID NO: 392 and a heavy chain comprising SEQ ID NO: 549; a light chain comprising SEQ ID NO: 393 and a heavy chain comprising SEQ ID NO: 550; a light chain comprising SEQ ID NO: 394 and a heavy chain comprising SEQ ID NO: 551; a light chain comprising SEQ ID NO: 395 and a heavy chain comprising SEQ ID NO: 552; a light chain comprising SEQ ID NO: 396 and a heavy chain comprising SEQ ID NO: 553; a light chain comprising SEQ ID NO: 397 and a heavy chain comprising SEQ ID NO: 554; a light chain comprising SEQ ID NO: 398 and a heavy chain comprising SEQ ID NO: 555; a light chain comprising SEQ ID NO: 399 and a heavy chain comprising SEQ ID NO: 556; a light chain comprising SEQ ID NO: 400 and a heavy chain comprising SEQ ID NO: 557; a light chain comprising SEQ ID NO: 401 and a heavy chain comprising SEQ ID NO: 558; a light chain comprising SEQ ID NO: 402 and a heavy chain comprising SEQ ID NO: 559; a light chain comprising SEQ ID NO: 403 and a heavy chain comprising SEQ ID NO: 560; a light chain comprising SEQ ID NO: 404 and a heavy chain comprising SEQ ID NO: 561; a light chain comprising SEQ ID NO: 405 and a heavy chain comprising SEQ ID NO: 562; a light chain comprising SEQ ID NO: 406 and a heavy chain comprising SEQ ID NO: 563; a light chain comprising SEQ ID NO: 407 and a heavy chain comprising SEQ ID NO: 564; a light chain comprising SEQ ID NO: 408 and a heavy chain comprising SEQ ID NO: 565; a light chain comprising SEQ ID NO: 409 and a heavy chain comprising SEQ ID NO: 566; a light chain comprising SEQ ID NO: 410 and a heavy chain comprising SEQ ID NO: 567; a light chain comprising SEQ ID NO: 411 and a heavy chain comprising SEQ ID NO: 568; a light chain comprising SEQ ID NO: 412 and a heavy chain comprising SEQ ID NO: 569; a light chain comprising SEQ ID NO: 413 and a heavy chain comprising SEQ ID NO: 570; a light chain comprising SEQ ID NO: 414 and a heavy chain comprising SEQ ID NO: 571; a light chain comprising SEQ ID NO: 415 and a heavy chain comprising SEQ ID NO: 572; a light chain comprising SEQ ID NO: 416 and a heavy chain comprising SEQ ID NO: 573; a light chain comprising SEQ ID NO: 417 and a heavy chain comprising SEQ ID NO: 574; a light chain comprising SEQ ID NO: 418 and a heavy chain comprising SEQ ID NO: 575; a light chain comprising SEQ ID NO: 419 and a heavy chain comprising SEQ ID NO: 576; a light chain comprising SEQ ID NO: 420 and a heavy chain comprising SEQ ID NO: 577; a light chain comprising SEQ ID NO: 421 and a heavy chain comprising SEQ ID NO: 578; a light chain comprising SEQ ID NO: 422 and a heavy chain comprising SEQ ID NO: 579; a light chain comprising SEQ ID NO: 423 and a heavy chain comprising SEQ ID NO: 580; a light chain comprising SEQ ID NO: 424 and a heavy chain comprising SEQ ID NO: 581; a light chain comprising SEQ ID NO: 425 and a heavy chain comprising SEQ ID NO: 582; a light chain comprising SEQ ID NO: 426 and a heavy chain comprising SEQ ID NO: 583; a light chain comprising SEQ ID NO: 427 and a heavy chain comprising SEQ ID NO: 584; a light chain comprising SEQ ID NO: 428 and a heavy chain comprising SEQ ID NO: 585; a light chain comprising SEQ ID NO: 429 and a heavy chain comprising SEQ ID NO: 586; a light chain comprising SEQ ID NO: 430 and a heavy chain comprising SEQ ID NO: 587; a light chain comprising SEQ ID NO: 431 and a heavy chain comprising SEQ ID NO: 588; a light chain comprising SEQ ID NO: 432 and a heavy chain comprising SEQ ID NO: 589; a light chain comprising SEQ ID NO: 433 and a heavy chain comprising SEQ ID NO: 590; a light chain comprising SEQ ID NO: 434 and a heavy chain comprising SEQ ID NO: 591; a light chain comprising SEQ ID NO: 435 and a heavy chain comprising SEQ ID NO: 592; a light chain comprising SEQ ID NO: 436 and a heavy chain comprising SEQ ID NO: 593; a light chain comprising SEQ ID NO: 437 and a heavy chain comprising SEQ ID NO: 594; a light chain comprising SEQ ID NO: 438 and a heavy chain comprising SEQ ID NO: 595; a light chain comprising SEQ ID NO: 439 and a heavy chain comprising SEQ ID NO: 596; a light chain comprising SEQ ID NO: 440 and a heavy chain comprising SEQ ID NO: 597; a light chain comprising SEQ ID NO: 441 and a heavy chain comprising SEQ ID NO: 598; a light chain comprising SEQ ID NO: 442 and a heavy chain comprising SEQ ID NO: 599; a light chain comprising SEQ ID NO: 443 and a heavy chain comprising SEQ ID NO: 600; a light chain comprising SEQ ID NO: 444 and a heavy chain comprising SEQ ID NO: 601; a light chain comprising SEQ ID NO: 445 and a heavy chain comprising SEQ ID NO: 602; a light chain comprising SEQ ID NO: 446 and a heavy chain comprising SEQ ID NO: 603; a light chain comprising SEQ ID NO: 447 and a heavy chain comprising SEQ ID NO: 604; a light chain comprising SEQ ID NO: 448 and a heavy chain comprising SEQ ID NO: 605; a light chain comprising SEQ ID NO: 449 and a heavy chain comprising SEQ ID NO: 606; a light chain comprising SEQ ID NO: 450 and a heavy chain comprising SEQ ID NO: 607; a light chain comprising SEQ ID NO: 451 and a heavy chain comprising SEQ ID NO: 608; a light chain comprising SEQ ID NO: 452 and a heavy chain comprising SEQ ID NO: 609; a light chain comprising SEQ ID NO: 453 and a heavy chain comprising SEQ ID NO: 610; a light chain comprising SEQ ID NO: 454 and a heavy chain comprising SEQ ID NO: 611; a light chain comprising SEQ ID NO: 455 and a heavy chain comprising SEQ ID NO: 612; a light chain comprising SEQ ID NO: 456 and a heavy chain comprising SEQ ID NO: 613; a light chain comprising SEQ ID NO: 457 and a heavy chain comprising SEQ ID NO: 614; a light chain comprising SEQ ID NO: 458 and a heavy chain comprising SEQ ID NO: 615; a light chain comprising SEQ ID NO: 459 and a heavy chain comprising SEQ ID NO: 616; a light chain comprising SEQ ID NO: 460 and a heavy chain comprising SEQ ID NO: 617; a light chain comprising SEQ ID NO: 461 and a heavy chain comprising SEQ ID NO: 618; a light chain comprising SEQ ID NO: 462 and a heavy chain comprising SEQ ID NO: 619; a light chain comprising SEQ ID NO: 463 and a heavy chain comprising SEQ ID NO: 620; a light chain comprising SEQ ID NO: 464 and a heavy chain comprising SEQ ID NO: 621; a light chain comprising SEQ ID NO: 465 and a heavy chain comprising SEQ ID NO: 622; a light chain comprising SEQ ID NO: 466 and a heavy chain comprising SEQ ID NO: 623; a light chain comprising SEQ ID NO: 467 and a heavy chain comprising SEQ ID NO: 624; a light chain comprising SEQ ID NO: 468 and a heavy chain comprising SEQ ID NO: 625; a light chain comprising SEQ ID NO: 469 and a heavy chain comprising SEQ ID NO: 626; a light chain comprising SEQ ID NO: 470 and a heavy chain comprising SEQ ID NO: 627; and a light chain comprising SEQ ID NO: 471 and a heavy chain comprising SEQ ID NO: 628, wherein
the antibody or functional fragment thereof comprises a cysteine or non-canonical amino acid amino acid substitution at one or more conjugation site(s) selected from the group consisting of
D70 of the antibody light chain relative to reference sequence SEQ ID NO: 455,
E276 of the antibody heavy chain relative to reference sequence SEQ ID NO: 612, and
T363 of the antibody heavy chain relative to reference sequence SEQ ID NO: 612.

20. The method according to claim 5, wherein the peptide is a GLP-1 receptor agonist is GLP-1(7-37) or a GLP-1(7-37) analog.

21. The method according to claim 5, wherein the peptide is a GLP-1 receptor agonist selected from the group consisting of exenatide, liraglutide, lixisenatide, albiglutide, dulaglutide, semaglutide, and taspoglutide.

22. The method according to claim 5, wherein the peptide is a GLP-1 receptor agonist selected from the group consisting of GLP-1(7-37) (SEQ ID NO: 3184); GLP-1(7-36)-NH₂ (SEQ ID NO: 3185); liraglutide; albiglutide; taspoglutide; dulaglutide, semaglutide; LY2428757; Exendin-4 (SEQ ID NO: 3163); Exendin-3 (SEQ ID NO: 3164); Leu¹⁴-exendin-4 (SEQ ID NO: 3165); Leu¹⁴,Phe²⁵-exendin-4 (SEQ ID NO: 3166); Leu¹⁴,Ala¹⁹,Phe²⁵-exendin-4 (SEQ ID NO: 3167); exendin-4(1-30) (SEQ ID NO: 3168); Leu¹⁴-exendin-4(1-30) (SEQ ID NO: 3169); Leu¹⁴,Phe²⁵-exendin-4(1-30) (SEQ ID NO: 3170); Leu¹⁴,Ala¹⁹,Phe²⁵-exendin-4(1-30) (SEQ ID NO: 3171); exendin-4(1-28) (SEQ ID NO: 3172); Leu¹⁴-exendin-4(1-28) (SEQ ID NO: 3173); Leu¹⁴,Phe²⁵-exendin-4(1-28) (SEQ ID NO: 3174); Leu¹⁴,Ala¹⁹,Phe²⁵-exendin-4 (1-28) (SEQ ID NO: 3175); Leu¹⁴,Lys^{17,20},Ala¹⁹,Glu²¹,Phe²⁵,Gln²⁸-exendin-4 (SEQ ID NO: f); Leu¹⁴,Lys^{17,20},Ala¹⁹,Glu²¹,Gln²⁸-exendin-4 (SEQ ID NO: 3177); octylGly¹⁴,Gln²⁸-exendin-4 (SEQ ID NO: 3178); Leu¹⁴,Gln²¹,octylGly³⁴-exendin-4 (SEQ ID NO: 3179); Phe⁴,Leu¹⁴,Gln²⁸,Lys³³,Glu³⁴,Ile^{35,36},Ser³⁷-exendin-4(1-37) (SEQ ID NO: 3180); Phe⁴, Leu¹⁴,Lys^{17,20},Ala¹⁹,Glu²¹,Gln²⁸-exendin-4 (SEQ ID NO: 3181); Val¹¹,Ile¹³,Leu¹⁴,Ala¹⁶, Lys²¹,Phe²⁵-exendin-4 (SEQ ID NO: 3182); exendin-4-Lys⁴⁰ (SEQ ID NO: 3183); GLP-1(7-37) (SEQ ID NO: 3184); GLP-1(7-36)-NH₂ (SEQ ID NO: 3185); Aib^{8,35},Arg^{26,34},Phe³¹-GLP-1(7-36)) (SEQ ID NO: 3186); HXaa₈EGTFTSDVSSYLEXaa₂₂Xaa₂₃AAKEFIXaa₃₀WLXaa₃₃Xaa₃₄G Xaa₃₆Xaa₃₇; wherein Xaa₈ is A, V, or G; Xaa₂₂ is G, K, or E; Xaa₂₃ is Q or K; Xaa₃₀ is A or E; Xaa₃₄ is V or K; Xaa₃₄ is K, N, or R; Xaa₃₆ is R or G; and Xaa₃₇ is G, H, P, or absent (SEQ ID NO: 3187); Arg³⁴-GLP-1(7-37) (SEQ ID NO: 3188); Glu³⁰-GLP-1(7-37) (SEQ ID NO: 3189); Lys²²-GLP-1(7-37) (SEQ ID NO: 3190); Gly^{8,36},Glu²²-GLP-1(7-37) (SEQ ID NO: 3191); Val⁸,Glu²²,Gly³⁶-GLP-1(7-37) (SEQ ID NO: 3192); Gly^{8,36},Glu²²,Lys³³,Asn³⁴-GLP-1(7-37) (SEQ ID NO: 3193); Val⁸,Glu²²,Lys³³,Asn³⁴,Gy³⁶-GLP-1(7-37) (SEQ ID NO: 3194); Gly^{8,36},Glu²²,Pro³⁷-GLP-1(7-37) (SEQ ID NO: 3195); Val⁸,Glu²²,Gly³⁶,Pro³⁷-GLP-1(7-37) (SEQ ID NO: 3196); Gly^{8,36},Glu²²,Lys³³, Asn³⁴,Pro³⁷-GLP-1(7-37) (SEQ ID NO: 3197); Val⁸,Glu²²,Lys³³,Asn³⁴,Gly³⁶,Pro³⁷-GLP-1(7-37) (SEQ ID NO: 3198); Gly^{8,36},Glu²²-GLP-1(7-36) (SEQ ID NO: 3199); Val⁸,Glu²²,Gly³⁶GLP-1(7-36) (SEQ ID NO: 3200); Val⁸,Glu²²,Asn³⁴,Gly³⁶GLP-1(7-36) (SEQ ID NO: 3201); Gly^{8,36},Glu²²,Asn³⁴-GLP-1(7-36) (SEQ ID NO: 3202); GLP-1 analog (SEQ ID NO: 3206); GLP-1 analog (SEQ ID NO: 3207); [N^{e}-(17-carboxyheptadecanoic acid)Lys²⁰]exendin-4-NH₂ (SEQ ID NO: 3208); [N^{e}-(17-carboxyhepta-decanoyl)Lys³²]exendin-4-NH₂ (SEQ ID NO: 3209); [desamino-His¹,N^{e}-(17-carboxyheptadecanoyl)Lys²⁰]exendin-4-NH₂ (SEQ ID NO: 3210); [Arg^{12,27},NLe¹⁴,N^{e}-(17-carboxy-heptadecanoyl)Lys³²]exendin-4-NH₂ (SEQ ID NO: 3211); [N^{e}-(19-carboxy-nonadecanoylamino)Lys²⁰]-exendin-4-NH₂ (SEQ ID NO: 3212); [N^{e}-(15-carboxypentadecanoylamino)Lys²⁰]-exendin-4-NH₂ (SEQ ID NO: 3213); [N^{e}-(13-carboxytridecanoylamino)Lys²⁰]exendin-4-NH₂ (SEQ ID NO: 3214); [N^{e}-(1-carboxy-undecanoyl-amino)Lys²⁰]exendin-4-NH₂ (SEQ ID NO: 3215); exendin-4-Lys⁴⁰(e-MPA)-NH₂ (SEQ ID NO: 3216); exendin-4-Lys⁴⁰(e-AEEA-AEEA-MPA)-NH₂ (SEQ ID NO: 3217); exendin-4-Lys⁴⁰(e-AEEA-MPA)-NH₂ (SEQ ID NO: 3218); exendin-4-Lys⁴⁰(e-MPA)-albumin (SEQ ID NO: 3219); exendin-4-Lys⁴⁰(e-AEEA-AEEA-MPA)-albumin (SEQ ID NO: 3220); exendin-4-Lys⁴⁰(e-AEEA-MPA)-albumin (SEQ ID NO: 3221); desamino-His⁷,Arg²⁶,Lys³⁴(N^{g}-(γ-Glu(N-α-hexadecanoyl)))-GLP-1(7-37) (core peptide disclosed as SEQ ID NO: 3222) (SEQ ID NO: 3222); desamino-His⁷,Arg²⁶,Lys³⁴(N^{e}-octanoyl)-GLP-1(7-37) (SEQ ID NO: 3223); Arg^{26,34},Lys³⁸(N^{e}-(ω-carboxypentadecanoyl))-GLP-1(7-38) (SEQ ID NO: 3224); Arg^{26,34},Lys³⁶(N^{e}-(γ-Glu(N-α-hexadecanoyl)))-GLP-1(7-36) (core peptide disclosed as SEQ ID NO: 3225) (SEQ ID NO: 3225); [Aib⁸;Lys³⁷]GLP-1_(7-37) (SEQ ID NO: 3226); [Aib⁸, Lys²⁶]GLP-1_(7-37) (SEQ ID NO: 3227); [Aib^{8,22};Lys³⁶]GLP-1(7-36)-Amide (SEQ ID NO: 3228); [Aib^{8,22};BLeu³²;Lys³⁶]GLP-1(7-36)-Amide (SEQ ID NO: 3229); [Aib^{8,22};Lys³⁷]GLP-1(7-37)-Amide (SEQ ID NO: 3230); [Aib^{8,22};BLeu³²;Lys³⁷]GLP-1(7-37>)-Amide (SEQ ID NO: 3231); [Aib^{8,22};aMeLeu³²;Lys³⁷]GLP-1(7-37)-Amide (SEQ ID NO: 3232); [Aib^{8,22};AMEF¹²;Lys³⁷]GLP-1(7-37)-Amide (SEQ ID NO: 3233); [Aib^{8,22};BLeu¹⁶;Lys³⁷]GLP-1(7-37)-Amide (SEQ ID NO: 3234); [Aib^{8,22};Gly³⁶;Lys³⁷]GLP-1(7-3 7)-Amide (SEQ ID NO: 3235); [Aib^{8,22};Lys^{33,37};Asn³⁴;Gly³⁶]GLP-1(7-37)-Amide (SEQ ID NO: 3236); [Aib^{8,22};Lys³³;Asn³⁴;Gy³⁶;Aeea³⁷]GLP-1(7-37)-Aeea-Lys-Amide (SEQ ID NO: 3237); [Aib^{8,22};Gly³⁶]GLP-1(7-37) (SEQ ID NO: 3238); cyclo[E²³-K²⁷][Aib⁸;Gly³⁶]GLP-1(7-37) (SEQ ID NO: 3239); cyclo[E²²-K²⁶][Aib⁸;Gly³⁶;Lys³⁷]GLP-1(7-37)-Amide (SEQ ID NO: 3240); [Aib^{8,22}]-GLP-1(7-22)-Ex4(17-39) (SEQ ID NO: 3241); [Gly^{8,36};Glu²²]GLP-1(7-37) (SEQ ID NO: 3242); [Aib⁸;Glu²²;Gly³⁶]GLP-1(7-37)-Amide (SEQ ID NO: 3243); [Aib⁸;Tyr¹⁶;Glu²²;Gly³⁶]GLP-1_(7-37) (SEQ ID NO: 3244); [Aib⁸;Lys^{18,33};Glu^{22,23,30};Val²⁵;Arg²⁶;Leu²⁷;Asn³⁴;Gly³⁶]GLP-(7-37) (SEQ ID NO: 3245); [Aib⁸;Lys^{18,33};Glu^{22,23,30};Leu²⁷;Asn³⁴;Gly³⁶]GLP-1(7-37) (SEQ ID NO: 3246); [Aib⁸;Lys¹⁸;Glu^{22,23,30};Leu²⁷;Gly³⁶]GLP-1(7-37) (SEQ ID NO: 3247); [Aib^{8,22};Ile⁹;Gly³⁶]GLP-1_(7-36) (SEQ ID NO: 3248); and [Aib^{8,22};Glu¹⁵;Gly³⁶]GLP-1_(7-36) (SEQ ID NO: 3249).

23. The method of claim 5, wherein the peptide is a GLP-1(7-37) or GLP-1(7-37) analog conjugated to the antibody or fragment thereof at a residue that corresponds to K26, K36, K37, K39 or a C-terminal amine group of the analog.

24. The method of claim 1, wherein the peptide is conjugated to the via a peptide linker comprising a sequence selected from the group consisting of (Gly₃Ser)₂(SEQ ID NO: 3350), (Gly₄Ser)₂(SEQ ID NO: 3262), (Gly₃Ser)₃(SEQ ID NO: 3352), (Gly₄Ser)₃ (SEQ ID NO: 3253), (Gly₃Ser)₄ (SEQ ID NO: 3353), (Gly₄Ser)₄(SEQ ID NO:3263), (Gly₃Ser)₅ (SEQ ID NO: 3354), (Gly₄Ser)₅(SEQ ID NO:3264), (Gly₃Ser)₆ (SEQ ID NO: 3356), (Gly₄Ser)₆ (SEQ ID NO: 3355) and GGGGSGGGGSGGGGSK(SEQ ID NO: 3351).
